United States Patent Application Publication US 2020/0246396 A1 - sequence listing, part 3

SEQ ID NO: 2 - DNA, 5444010 bp, Clostridium immunis (residues 3,629,341-5,444,010 of 5,444,010)
gatgagcggcggtaattatgtagatgatgaaatggtcaatcctggaccaatctttaagtttgaagatgtgaatacttatggaatgggaatcgaggatttatatcttcctgattatataagcgttggatcaaatgtacatgtgaccgctgaagttgaatattttagtgagaatgaaggtgttttttatctaaatcctgtgaaagttgagtcccgataaaataaagaaattatttagcctgtacctattggaatgggggtacgggctatttttatgttttcatttggttctttttttgcgcgcgaaaaatacatcgactgttatgaagagagagggttaaaatggccattctctcttttattttggagaaaggaggctcacttatgttggaaagcgaatttcagaacaaattgattcaagaactgaaaagaatgttcaaaggctgtatcgtaacaaaactggattccagtcatatccagggaattcctgatttgctgattctttataacgataagtgggccactttagaatgtaaaaaaagcgttcgcgccaagaaacaaccgaaccaagaatattatgttggacgaatgaacgagatgtcgttctcaagatttatttgtcctgaaaataaggaggaagtgttacatgatcttcaacaagcattctgctcttgaagggcaacacgcctttcttggcgcaagtaaataccattggatcaactatgatgaatccaaagttgcagaatcgtattcaaaatttctggcaactcaaaagggaacagaacttcacgattttgctgcaaagtgtatctcacttgggcagaaacttccaaagtctcagaaaacattgaatatgtatgtaaatgatgccattggcttcaagatggttcccgaacaacctcttttctattcggaaaattgttttggaacaacagatgcgattacgtttcgaaatcggatgcttcgcattcatgatttaaaaaccggcgtcattcccgcgcacatggagcagcttgaaatatatgctgctcttttttgtttggaatacaaaatcaagccagccgacattgaaatggaacttcggatttatcagaacaaccagattctttatgagaatccaacggctgaaaccattgttcccatcatggacaagatcatcacatttgacaaagtaatcaacaaaatcaaagaacaggagggctaacttatgaatccgattgcagaagaaattttgatgcattatggaatgccccgccgttccggtcgttatccgtggggatctggtgataatccgtatcagcatagtggagattttctgagtcgagtggatgaactgaaaagtcagggtatgagtgataccgaaattgcaaaagccatgggtttaaccaccactcaataccgtacgcagaaatcgttagcaaaagatgaacgtcgtgcgctggatgtggcgagagcaaaatctcttcgagaagatggtttgagcttaaatgaaattgcgaaagaaatgggcttcgcaaacgactcttctgttcgttcgcttttgaatgaaaattctgaggttcgtatgaaccaagctaagacaactgctgaaattatcaaaaagcaaattgacgaaaaaggcatgattgatgttggtgccggtgtggaacgtgaacttggaatttccaaggagaaactgaatgaagcactctatatgctggagatggagggttatcctgtttacggcggacgagtggatcaggtaacaaatcctgggaagaaaacaacgcttcgtgtgatttgtcctcctggaacagagcataaagagatttacgattttgagaatatcaattctctgaaagattatgtctctcatgatgatggggaatcttttgatcccaaatttgtttatcccaaaagcatggattcaaagcggttgcagattcggtattcggaagatggcggcgaattgaaggatggtgttgtggaaattcgaagaggtgttgacgacctgtctcttggagaatcccattatgctcaggttcgcatcttagttgacaagacacactacatcaaagggatggcggtttattcagatgaccttcctgatggcgtggatgttatgttcaacaccaataagaaaaaagggacacctaaaatggatgttctgaaaccaatcaaagatgacccggataacccgttcggttctttaattaaagagggagttaatgacccggataaccccactactgaaagaggaggtcagagttactactatgataaaaatgggaagaaacagctttcccttatcaacaagcgagcagaagaaggggattggggcgaatgggcagacaagcttccatctcagtttctgtcgaaacagagtagaactttgataaagaagcagttgaatttagcggccgcagacaagcagtctgaatttgatgagatttgttctcttacgaatccaacagtgaaaaaggttcttttgaaatcttttgctgatgactgcgatgcagccgctgttcatttacaggcagccgctcttcccagacagaagtatcaagttattcttccattgacatctatcaaggacaatgaggtctatgctccgaactacaagaatggagaaacagtagctcttgtgcggtatccacatggtggaacttttgagattccaatcttaactgttaataataagcagccagaaggaagaagagttcttgggaatacaccagcagacgctattggcattaacaaaaaggttgctgaccgtctttccggagctgacttcgatggcgatactgtcatggtgattccttgtaattcttctaatagtagggtgaagattacttctactccacaattaaaggggttggaaggattcgatcctaagatgtcttatgggaccgttaagaaaggtgacgattattgtaacagcggcggtcagaagattaagattatgaaaaacacccagacagaaatgggtaagatttcaaacttgattactgatatgactttaaaaggtgctactcaggatgagcttgcaagagctgtacgtcacagtatggtcgtcatcgacgcagagaagcataagctagactacaagaagagtgagcaggacaatggtattacggctttgaagaagaagtaccaggctcatgatgacgatgatggttatggcggagcttctacgctgatttctcgtgccaagtctgagacttctgtgttgaaaagaaaaggaagcccgatcattgacaaggaaaccggagagcaaagttggaagagcgtcagggaggagtacatagataagaacggaaagacccaggtgcggactcaaaagagtaccaagatggcagaaaccagagacgcccgtagtttatcttctgggacaccacaggaagaggcgtatgcggactatgcaaataccatgaagtccctggctaatcaggcccgtagggagatggttaatagcggaaagatagcctactctgcttcagcaaaacagacctaccagacagaggttgattctcttatggccaagcttaatgtggctttaaagaacgcccccgcgagcgtcaggcacagaccatggcaaactctattgtgtccgccaagaaaaaagataaccccgatatgacaaaagccgaaatcaagaaggctaatcaacaggcccttactgcggcccgtactgctgttgaggccaagagaacccctgtcgagattacagatcgtgagtgggaagcgattcaagccggcgctatcagcgagaacaagcttacccagattctcaacaatacaaacatagatacagtcagacagagagctactccgcgtgcaacaacaacccttagttctgccaaagtaaatcgtattgcggcgctgaatgcttctggctatagcactgctgagatagcagcggctttgggtgtttccagttctactgtgtcgaagtatctgaatggaaaggagtgaacaaagtaaatggcgaagaagtgtatgcttacaaccattgacaatcctttcgatccatttgaacagttcacttcatggttactgtttgatgaggaaaaaggttatcattcatgttcgtatcttggtagaattgccagaacctcggaccaactctccgatgaagagaatgacttggaagttgaacgagcaattgatgagatcgtaaaatacgatttccgaaacatttacaaaaaagttacgcgagacgcggtggctgtctaggtatcagatggtataggggggggtagcaaaaatcgcacccccctccgtcatcgcggcggtctttaaaaattccccggggtatttttcggagaatgtttttacctcccggcagtatttaacagagctcataaggttggctaagtaataagctgtggttctttttactcttttttctcctttcggtaaaaaagttacagtcagccttgtgggttcttttaaatactgccggaaaacttttatgaaactattgaagaacagacgggaaggaggcagtaaatggctagaaaagtaaagagttctgaatcgacaggttcttccaaaaagattcgtcctgctttgactccggaagcaagggaacttcagatgatttctctggctgttgacctggctgaaagacaattgctggaagggactgcttcttctcaggtcattactcactatttaaaactgggctcttccagagagaagcttgagagggagagactggaggaagagaacaatctgttgcgggcaaaagtaagagctattgactccacagatgagattaaagatctctataaggacgccatcaatgcgtttcgtatatacagtggacagggtaacgatgatgattaggacatattcggaattatcgaaattgaagacttttaaagaacgatacgagtatcttcgtttgggcggagtcatcggggcagacacgtttgggtttgaccgatatctgaatcagattttctatcggtctatggagtggaagtcagttcgtgattttgtgattgtgagagataacggatgtgacctcggaatagaaggtcgtgagatatgtgggaagatattgattcaccatatgaatccgatttccgtggaggatattttaaagagaagcgattttcttttaaatccagaatttctcatctcaacaattcttacaacacataatgccattcactatggagatgaaagtcttcttgtcacagaacctattgttcgaagcagaaacgatacatgtccctggaaacattgatggagaggaggttatagcgattatggaaagcatactgacatcaattaaaaagatgctgggtattacagaagagtatgagcactttgattcagatcttatcatacatatcaattcagtatttatgatcttgacgcaacttggtgttggtccaccatctggattctctgttcaggataaaagtgctacatggaaagaattcatttctgacgagacaaagttgcaattggtaaagtcgtatatgcagatgaaggtaaagctcctgttcgatccgcctttgagttccgctgtaatggcgtctatggaaaagatgattgctgaggcggagtggagactgaatgttgcagcggaaactgacgaagataagtccgaagaacacgagtcctacgatggcgagtatagggtaacgccgaaagcattccaatctcaaatgctggatactgagaacaaagttctggatcgaaatattgtggtaacagaagttccgtattacgagactgggaacgcagcaaacggagtgacatcatatatcgcaaaggagggagattcaaaatgagtaatgaagcattactacagcatcacgggattcttgggatgaaatggggcgtccgaagaactcccgaacaacttgcaagagcaagtggaaagaagacgagttccgatgatgaggtgaagaagatgtctgattcggaactccgctcaaagatcaaccgtcttcaaatggaaaagcagtataaacagcttaccagttcagaaatttctgtcggtagaaagtttgtacaggatgtgctgaccaatgccgcaaagcagaccgccaccaattatgcatcgaagtacatgacgaagggaattgacgcggtcatcaagaaagcaacaagcaagtaggtgattcaattatggcattatcaaacactgccgttcccaaatactacggcatgtttcgggatgccgtaatcaggggagagataccggtttgtaaagaaatctctatggagatgaaccgaattgacgacctaatagccaatcctggtatttactatgatgaccaggccgtcgaaggatggattgcctattgcgaatcagaactaacattgacggacggttctgatttgaatttgctggactcgtttaaattgtggggcgagcagctttatggatggtactacttcgtcgaacgaagtgtgtgggagccaagttctgacggacatggtggccgatatgtgaataaaagaatcaagcagcgtctgacgaagaaacaatatcttatcgttgggcgaggagctgctaaatctttgtatgacacctgtgttcattcctatggattgaatatcgacacatccacgactcatcaagtcacgacagcccctaccatgaaacaggctgatgaggtgatgtcaccttttcgcactgcgattacaaggtcgagaggtccattgttccggtttctgacagagggctctttgcagaatacgactggttctaaagcaaagagaatgaaattggcctccaccaaaaagggtattgagaattttctcacaggttcgcttttggaagtgcggccaatgtccatcgcaaagcttcagggattacgacctaagatttctacagtggatgagtggctgtccggtgatactagagaagatgtggttggcgctttggagcagggtgcgtctaaattggatgattacatcattgtcgccacgagttctgagggaacagtgagaaatggagcaggcgacacaatcaaaatggagttgatggacattctcaaaggagaatatatcaatcctcatgtttccatctggtggtacaaactcgattctatcgatgaagtgggcaatccagatatgtggctgaaggcaaatcccaatattggtaaaacggtaagctatgagacctatcaactcgatgtggaaagagcggagaagtctccggcggccagaaacgatatcttggctaagagatttggattgccgatggagggctacacctattacttcacatatgaagaaactcttcctcataagaagagaagctattggcagatgccctgctctttgggaattgatttgtcgcagggggatgatttctgtgcttttacgttccttttcccgttatcgaatggttcctttggagttaaaaccaggaactacatttcttcatcgactctgatgaaacttccggcagcaatgagaatcaaatacgaccaattcatggacgaaggaagcctgattgtcctagagggaaccgttttggatatgatggaagtctatgaagatttggataaccatatcacagaatttggctatgacgttcgttgcttggggtatgacccatacaacgcaaaggagttcattgagagatggtcttctgaaaatggtccgtttggaatcgaaaaggtaatacagggtgctaagacggaatccgttcctttaggagagttaaagaaactttctgaggagcggatgcttttgtttgatgaagaacttatgacctttgcgatggggaactgcatcgttatggaagatacgaatggaaaccgtaaattgctgaaaaagcgttatgacgcaaagattgatgccgtggcagctatgatggatgcgtttgtcgctttcaagctcaaccgagatgctttcgaataggaggtgacgatttcaaaatggaagtttcaatcggttccaggattaaacatgcctggaacgcttttttaaatagagacccaacaggtttctatcgggacataggggttggatattcgtacaggcccgaccgtccaagactcacaagaggaaatgaaagatctatcgttacctctgtatataatcgaatcgcattggattgcgcttcaattaacattcaacatgtccgtctggacgactccgaaagatttcttgaaaaaatttcttcggggctaaatgattgtctgaatttatcagccaacattgaccagactgggcgggctttccttcaggatgtggttttgtcaatgctcgatgagggatgtgtggcgattatcccggtggatacggatgatgaccctgacactacaggctcctataaaatcgagtcaatgcgaaccgggaagattctggaatggtttccgaatcatatcaaagtaagagtttataatgagcggactggattaaaggaagacattgtagttccaaaagatacggtcgccattattgaaaatccgctttatgcggtgatgaatgagccaaactcaacgatgcagcgtttgataagaaaactgaatttattggacgttgttgatgagcagagcagttcaggaaaactcgatttaattatccagcttccctatgtgataaaaacagaagcaaggcgtcaacaggctgagaagaggcgtgtcgagattgagcgtcagttggccggttctaaatatggtattgcgtatactgatggtacggagcgaatcacacagttgaatcgttctgtggaaaataatctgatgaagcagattgaatatctaacgagtatgctatacagccagttaggtatcactcagagtatattggatggttccgcagacgagaagaccatgctgaattactacaaccgtactattgagccgatcatttcagcaatcgttgacgaaatgaaacgtaagttccttactaaaacagccaggtctcaaaagcaatcgattctgttcttccgtgaccccttcaaacttgtaccagtagctgatctgtcagaaattgctgacaaattcacaagaaatgagattatgacatcaaacgaaattcgccagattattggtatgaaaccgtctgatgatccaaaagctgatgcgctgaagaacagcaatatcagtgaggccaaatctgatccttcaaacggtagttctgatgtcgaatccaatgaaagtgatgccggagccgattatgacagtatcgtaaacgagctgcttgacggtcttgaaaaggagattgatgaaattataggaagctatgtttcggatgatgaggaggagtcctaatggatattaacgagcctcttcaacactatgcatctccttattacgacccggtgaaagctcatgaatattatatgagaaccagagaactcaaagggcgtcgttccacaatgaagcttaacgatgagggaaagaaagtctgggcttatacaaaaaatgagatttctggtgagaagaaggaaaaggtaaaagaagaacaggaaaaacggaaacaaaaaattgctgagctgagagcaaaggccaaggcgacccgagagcagatctcggctaaattaaaggaactgaatactcagcttaccgaggaatcttcgtcgagaaggagtagggttgactcccgtaaaaaatctgatttggaggatattggagaagaagtagaagaccagaaagagcgtatcgatgaaaagaagaatactgagatcgaacgcttaatggcaatagaaattccatccgggttatccaaagaggaaagggcaaagcgagtagcggagcgaaatgagaaaattacaaagcttcgtgatgatgccagcgaggataaatctaaggtgagtgagcaggcgaaagctgaaaaggaagaggtgagaacttccgcaagtcttaagaagaagcgaattaccgaggacaccaaagaagaaagggctgataattctgcgaatgctaaatcggaaagagaaaaagttagtacagagttaaaggctgccgttaccgccgcaagggaagcttataaagcggcaaaagaaaatcttgatgccacttatgaagatctttatcagcaagagtttgacaagatagcttccgaatataaagcggtaaagaagaggaaacggaggaagtagcaatggctttcgcacaatactgatagaaggagtgattttcaaaatggagaaatacgattttagtggttgggccactagaaacgatcttctttgcaccgatggccgtaccatcaaaagggatgcgtttaagaaccagaatggacaaactgttccactaatttggggacataatcattccgatcccaatcgtgtactcggtcatggggtactggaaaatcgtgatgagggcgtttatgcctactgtagtttcaatgacagtgaatccggacaggcagcgaagaagctagttaagcacggagatgttcgttcactttctatttgtgccggtcagcttaaacaggccggagcgagtgtgatgcatggcgttatctatgaactgagccttgttctggctggagctaatccgggagctttcattgattctgttatggctcacggtgagacttcagaagaccgtaccattattggatatgacgagaacattatgatttatcattccgccgaggaggatgacaaatccgaggaaaagaaggcggaggagaaatccaaatctaaggaagataagacttctgaagaaaaacctgaggaagttgaagagacaattgagcaggtatttaataccctcaatgaaaagcagaaaaatgtggtttatgcaatgatcggacaggctatgggggaaaccgataagcctgaagataaaaatgatgacgattctaaaggaggaaataccgagatgaagcataatgtgtttgacaacgataagaaaaacgaaaccggtggctttctgacgcattccgcacaggaagacatcatcaaggcggcgaagaccagccaggttggtactttccagacagcgcttcagctttatgcggagcagaacggtcttcagcatgatgctgtcagcggcggatttgttcagaccggcgacggaaatgtgacgagtctgttcccggaatatcaggaagtgcgtccgggggctcccgaactcattaccaatgaccagggctggattaccaatgtgatgaagaaagtacataagagcccgatttccagaatcagaaccagccagaccgatattcgcggtattgatacacttcgcgccaggggctacaagaaaggaaaagagaagaagcaggccggaaatttcaagctggtacgcagaaccaccgatccgcagactgtttatgtgaagaatgctctgcatcgcgacgacattgtcgatatcacagatttcgattatgtaaagtatctgtatgacatcgaccgcctgatgctcgatgaagagctggctattgcgatgatgctgggggacggtcgtgatgatggtgatgagggtaagatcgatccggataagatcagacctatctggaccgatgatgacctgtataccattcatgcagatttggatgttgccgccgcaaaaaatgaacttcagggtactaataccggcgtgaactttggcgagaactatatttacgctgaagcaatgatcaatgcggttttgtatgcaagagaggattataagggtacaggcactcccgatatgtacatcactcctcacatgctcaatgtaatgctcctggctcgtgatatgaacggccgccgcatttatagctctaaatcagagctggcttctgctctgaatgtcggggaaatccatacggccgagcagttcgaaggcaagactcgtaagacggacgacagcaagaccaagaagctgcttgccatcatcacgaacctgaatgactactctctgggtgctacgaaaggcggcgaagttactcacttcacgcagtttgatatcgactttaaccaggagaagtcccttctggaaaccagatgctccggcgctctgaccagagtgtactccgccattgcgattgaagaggacgtaacggtaaacccttaatcagcttctccgttagtcccgaagatggagaagccaatctgttcgggaaaacggtaaattcgttacaggagaatattgctatcagagagtctgagattaccggtacattgaagcatgttactggatatacgggatttagcagtaatacttctgagcaggaaggaaactatcttgctttgaaagttgatgctgattccgaagatgcagttgcgaccgttgaactcgtaggtggtaccaaaggaccggttacgcttgatgacgacatgaacattgtactccttattaagaataaggatactcagagcattaaggtgacggtagacaatggagaaaattccactacgaagacttatgggcttattggattgactttggagacagagtaaaggagaaaattcaaaatggcaaagttttttgggaaaatcggctatgcaatatcaaaggacgttcgtccgggtgtttgggacggggaaattactgagcgagagtatttcggcgatttgattcggaataccagtcggtatcagacttccgataaactcaatgacgatatcaacatttccaatgagattagcatcgtggccgatccttttgcttatcagaattttcacgcaatgcggtatgtcgagttcatgggagcgaagtggaagatttccagtgttgaagtacagtatccgcgtctgattctgacggtaggaggtgtgtataatgactgatcgacgaatcctgtttcataaactgttgtgcgagattttatcttgcccgatagaaggtgaacagtgccgatgttattttcagcctccggaatctattaagatgaattaccccgctattgtatatagccttgatgatgtagacaagacatatgcaaacgacggggtatatttatctaatcgaagatatgccgttaccgttattgataaagatccggatacatccttggtgcagaaagtaacgaatttaccgatgagccggtttgaccggcatttcaaaaaagataacctgaatcactacatttttaatgtgtatttctaagattggaggaataattcaatgagtaagcttatttgggataaagttggggaacgcctctacgaaactggtgttgatcatggtgttctctacccgattcagactggtggacagtataacaaaggtgttgcttggaacggtctgagcgcggtgacagagagcccttccggggcggagccctccccgatccatgcggataacatcaagtatctgaacctgatgtccgcagaggatttcggcggaacgattgaggcttatacttctccgaatgaatttgcggagtgtgacggttccgttgaagtcgctcctggtgtctttgcaggccagcagagcaggaagcagtttggactttcttatcgcactattcttggcaatgatgtagattccaatgactatggttataagctgcatcttgtttataattgccttgcctctgtttctgagaaaggctataccactgtgaatgacagcccggaggcaatcgctctgtcctgggaattcagcacgactccggcggagattgcgaagataatcgatggtaagaagctgaaacctaccgcaatccttacactggattctactaagattgatgcgaagaagctggcagctctggaagaaatcctgtatggtaaagacccgactactccagagggtaatgatggcgttgatcccagactgccgtttcctgatgaagtgattgagcttctggctgctgaagacctcccttaatgagcctttctgttaagcctgaagacggagaggctgttttatttggaaaagcagtgaatgaattgcagagtgatatggttgttgctgatgatgaagtgacaggcactctgaagtatgtcaatggttatgttgatttcagcagtaatacttctgagcagtcgggaaattacctggctctcaagattgaggctgagccggctgaagcagagacggttgttgagctcgtaggcggtactaagggaccggttgcgctagatgacgacatgaacattgtactccttatcaagaataaggatactcagagcattaaggtgactgccacgcacaacggggaaagcatcacgaagatttatggtctttctgggcttaccttggaaacagaataacgataggaagcctcgtattcaatgtgcggggcttctttttatttgaaaggagaaaaaattatgctgaagaaaaccattccctatatcgatctgaacggtgtcgaaagaaaagaggatttctatttccatctgtcaaagccggaaattgtcaagatgcagacaagcgtgaagggcggctatgatgtacagctcaaaagtattggtgccggcgctgatggcggccagattatggaattctttgaagatctcattaagaaagcttacggtgtcaagagtgaagatggccgtcgctttatgaagtctgaggagatttccagatcctttatggaatctcctgcttatgagattctctttgaggaactggttacgaatgacaagacagcagcagactttgtgaatgcggtgatgaacatcggcaattctgccacagctcctgcaattgcagcaaacactcagaattaatggagaggtgagagatgctccgaatcacaataccatccacggaattctgggatgaggtgaagcaagagtttgtttacacaaaggctcagaccttgcaattggagcattctcttgtttctctttcaaaatgggaatcgagatggaataagccgtttctgacgaagcaggaaaaaactttggaagaaaccatcgattatgtaaaatgtatgactcttacacagaacgtgaacccggaagtttataactatctgacaaacagcaatatcaatgaggtcaatcggtatattgctcttcctatgactgccacccggtttttcgaggagaaaaaaacgcagggaagcagagagcagattacggcagaactcgtttattactggatgatagctttaaatattccatttgaatgtcagaaatggcatctcaataaactgtttactttgataagagtatgcgatgtgaagagcaggccgccgaagaaacatagccgcagagaaattatgaaacggaatgcggcactaaatgcggcccgtaaaaagaaatggaatacgaaagggtgattactatgagtaacagcagcttggtgaattgtacggtaaaaagtccaaaccatagtggagccagaacgcattcaatcgaccggatcactccgcattgtgtggtcggtcagctttcagcggaatctattgggggctgctttgacagtagtaacgtacaggcttcttgcaactatggaattggtagtgacggacgtgtggttctttgcgtggatgaagcaaacagaagctggtgttcttccagcaatgcgaatgatcagcgtgctgtgacgattgaatgtgccagtgatatgactcatccgtatgccatgactgatgcagtatatgaaaagctggttgctctgtgtgttgacatctgccggagaaatggtaagacaaaactcctttggtttggcgacaaggacaaatctctgaactacagtcccaaatcaaacgagatgatccttacggttcatcggtggtttgccaacaaatcttgtcctggggattggctgtattccaggctggggaatcttgcgaatcgggtaactgctcagcttggcggaagtacgactgacagcgtccagaaaacctacaaaactggactttacaaagtcaacatcggtgatttgaatattcgcaaaggccctgggacgaattacggaaccaatgggatgattactgaccgaggtacttacacgattactgaaattcagaacggttactggggcaggttgaaatccggtgcaggatggatcagcgttcatgaagcttactgtacctataaaggcgcagcttcttctgattctggtggatcagtagagaagccttctggaaattttctggttcaggtggacatttccgatctgtatatccgtaaaggtcccggaacgaattacggaaccaatggtttctgtccgaaaggagtctacaccatcgtcgaggttaaaactggcgctggttctgatgctggatggggtaagttgaaatctggagcaggatggatctcactggattacgcaactcgaatttaaagaggatacacgatgataagtttcagacaaaagggtgacttctccaagttgacacgctttctggagagagcaaaagaagcggttcacatcggagacctggacaagtttggtaaagagggagtagccgcccttgcgtctgcaacaccagtggattctggggagacggcgaattcctggtattacgaaattgagaatcggaaaggttcggttacaatttcatttcataattcaaatgttcaaaatggagttccaatcgctgttattttgcagtatggacacggaactcgaaacggcggctgggtacaggggcgagattacatcaatcctgctatccagcctatttttgacgaaattgcaaataacgcatggaaggaggttactaagctatgagtaagacgattgatgaaagagtcgttgaaatgcgattcgataacaaacagtttgagcagaatgttcagaccagtatatcttcaattgaaaagctcgaaaaaagcttaaacttaaaaggtgcctccaaaggattggatgacgttaatgccgcagcaaaaaattgcaatatgactccgctttccaatgcggtcgaaacagtaaagatgcgattttcggcgttggaagtcatggcagttacggctctggcgaacatcacaaattcagcgttaaatgctggtaaaaatattgtttctgcactgacaatcgatccgattaagactggatttcaggagtatgaaacacagatcaatgcagttcagactattcttgccaatacacagagcaaggggacaaccattgaccaggtaaatgctgctcttgatgagttgaacaaatacgctgatcagacgatttacaattttacggaaatgacccgtaacattggtactttcacggctgccggtgttgacttggataaatcagtaacgtcaatcaaaggtattgccaacttagcagcagcttcgggttctaatgcttatcaggccagtaccgccatgtatcagctttcgcaggcgattgcagcgggcaaggttagtttgcaagattggaattccgttgtaaatgctggaatgggcggtcagctatttcaagatgccttaactcgaaccgcagaacatttcggaaccaacatggacgcgatgattgaacagtatggttcattcagagcttctctgaccgaaggtggatggctgacaacagaggtgttgaccgaaactctgacacagttgtctggagcttactcggaagcagatcttatcgctcagggatatacggaagaacaagctaaagagattacaaaactggctcagacagcattggatgcagctaccaaggtaaagacattcacgcagttatgggacaccttgaaagaatctgttcagtctggttggactcagagttgggaaatcatcattggtgatttcgaagaggcaaaagaacttttaactgaggttagcaacgcccttggcaacatggtaaatgcttctgccgaagcgagaaataagatgttgcaggattggaaagatcttggcggacgaactgcgttgattgaagcagtaaggaatgctttcgagggtgttttaagcattataaagccagttaaagaagcgtttagagaagtctttccgccgatgactggagaacagctttacaatctcactgtaggattacaggaactaacagaaaaattcaaaatgggcgaagaaacagcgaataacctgaagagaacattcaaaggggtattcgctttatttgatattggacttcaaggtgtcaaagcgcttgttggtggatttgcagatttgattggttatgtggctccggccggagatggaattcttgggtttacagccagcgttggagatttcattgttggtattgatgaagctattaaatcgtctgatgcctttaacaaagctatcgaaggaatcgggaatttcctgaaaccaattgcggatggaataaagacttttgtaaaaacagttgccgatgcgttcagcgagtttgcgaatgttgataccagtggtctcgataattttgcggataaggtacagactcggtttgaaccgtttgtaaaattaggagagttggtaaagaaggcatttgaaggaattattgggattgtcgagaaggtagcgcctgttttatcgaagctgggttccattgtcgcaaatgcgtttggaaaccttggagaagcaattcttacagcatttgatacagcgagtttcgatccgattttggacttaatcaatacgggattgttttctgcaattctgattggagtgaaaaaattcattgactctttatcggagatcacagaaaatggcggcggaattcttggttcgttcaaagatattttggatggagttaaggggagcctcgaagcatggcagtcgagtctaaaggccgggactcttctgaaaattgccggcgctatggcaatcctgaccgcagcgattgtggcattgtctctggttgattccgagaagctaaatgcgtccttgggggctttgagtgttctgtttgttgaactgcttggttcaatggccatctttgaaaagataatgaacggagcagcaatcaaaggaatgggacagttgaccattgcgatgattgggatgtctactgccgttcttattcttgcaggcgcagttcagaaactatctggtttggattgggacgagcttctgaaaggattggtcggtgttgctgggttatctgctattctggtagcgtctgcaacagcgctttccaaaacatcgaaggggctgataaaaggttctgccggtttggtagtatttgcggcagcgattcgagttcttgtaggagcagttgaagatttaggagctttggatgtgggctctttggctaaaggtctaatcggagtcggcgttctttgcacagaactggcgttgttcctgaaggctacagatttggatggaatgggtgttctgaaaggaaccggattggttcttcttgcagcgtccatcaatattctggcggatgcggttaaggcatttggagatctggacacttcaaacctgattcaaggactatctgcggttgccgtggttcttaccgaactggcggtattcaccaaagttacggctaacgcgaagcatgtagtttccaccgctacagcgatgacgattcttggagcagccatgctcgtgtttggagaagcagtgaaaaagatggggaacctgacttggggagagattggacgaggtcttaccacgatggccggttctctggcggccgtgacagttgcgatgaatctacttccaaaaggaatggtgtcgaaagcgactggaatggtagaggtcggtgcagcattactcattatcggcgaagcagtccgaaatatgggcggaatgtcctgggatgaaatcgccagaggactggtaacccttgcaggttccatgaccattcttgttgtggcactcaacgcaatgaaaactgcacttccgggtgcggcagcggttcttaccgtgtccgctgcattggcgatatttaccccggttctcaagtcattggggaatatgtcttgggagagcatcgccaaagggttggtggcactggcaggttctttcacggttctcggtgtcgcaggagtggcattagggccattgaccccagctattttaggactttcggccgccattgctgtgttgggagtaggatgtctggccgcaggtgctggcattctcgcattttccactggactttctgctttggcagtatctggagcggcgggagcagcatctctagtagtggcagtatccagtattctcagtttgattccgttgctgttcgaatctatcggggaaggaatcctttctcttgctggagtaatcgcaaatggcgggccagctattgccgaggcatttacagcattggttcttgccgcagtcgatgctttggttacggctgtaccagcagttgtggacgggctatttgtcctgatcgacagtgtcctttcggctctggtcgaacacacaccgaccatcgtggagcagttattcgatattctgattgggattattcaggctatcacaacgaaactaccggaattgattaaagctggcgtagagttactgatggctttctttgacggggtaatcgacgccttgagtggcattgatgtgaatgtactcatcaaaggaatcgctggaattggtttgctctcagcaattatgcttgctctcagtgctgttgcttccttggtacctggggctatggttggtgttctcggaatgggtgcagtcattgcggagttggcattggttctggcggctgtcggcgctctggctcagattcctgggttggaatggcttatcggtgagggcggaaatcttcttcagggaattggtacggctatcggtcaatttgttggcggaattgtcggcggtttcatgtctggagtttcaagtcaattccctcaaattggttcagatctttctgcgtttatgacgaatgtgcagccatttatcgagggtgctacacagcttgatccctctatgctggacggcgtaaaagcattggcagaaacaattcttattctgaccgctgccgatattttgaacggattgacttcctggattacaggaggatcttctctgagcgactttgctactcaactcgttccattcggtgaagcgatgcgagatttctctatcgccattgctggtatggacggggaattggtggcaaatgcggctacggcgggaaggacacttgcggagatggcggcaacccttccgaattccggaggagtcatcggcttctttacgggagagaacgatatgagtgctttcggcgcccagcttattccatttggcgaagcaatgatggggtttgcaaatgccgtaagaggactggatgtagatactgtaacgaatgctgctaccgcaggaaaggctatggctgaaatggcaaccacaattccgaattctggaggcgtggtaggtttctttgttggcgaaaatgatatggatgcgtttggcgagcagcttgtaccgtttggcgaggcgatgatgctgttctctcaggcggtaagaggtttggatgcgaatgtaatcgtggaatctgctactgcgggaaaggctttaatcgaattagcaaatactgttcccaacagtggcggtgtcgtgggcttctttacgggagagaacgacatggacacgttcggggagaagttggtgccatttggcagagcgatgaaatcctactctgacgcaattgcaggtattgatgtggaggccgttacaaattccgcaacggctggcaaagcagtagttgagttggcgaatacgttaccgaatacgggtggattggtaagctggtttaccggagacaatgatattgccgcctttggcacaagtttggtttcctttggtaagagcttcgcacaatattccgactatatgaaagatgtggatgcgaacatcgttaccactacaaccaatgctgctacatccattgttgagcttcagaaaagtcttccaaaagaaggcggatggttctccgatgatatgacacttgccagttttggtagtgatatggcatcgttcggttcccatttcagtaattattacaacagcatcagtggtattgatacgacgttgttgtccggagtgatcacccagacaaaccggcttgtcggtatggcaaatgggatggttggtctggatacaagcggtatgacttccttcagctctgcgttgacaacgcttggtgaaaccggtgtaaccggatttatcaatgcattcaataatgcagaatcgaaagtaacagccgcggcttcaagtatgttgtcgtccttcatcaatggtgcaaatgcgaagaaatccgaactgacaacgacattcactacgctggttcagactgtcttgacggcgatcaacggaaaacaaggcgagttccaaaccagcggttccacgcttatggttaaatttatcgccggtgtacggtctcaggatagttcttccagaacaacctttaccaatatcgttagcggttgtttgactgtaatacgaaataagtacggggaatttacgtcaaccggaacccagacgatggtgaagcttattgccggtgtcagatcgcaggacagtagtgcgaggctggcgtttacaaacattatcagcgcttgtcttacggtgattaaaaataaatatgcggagtttacctcgactggtagagagtgcatggttaaatttatcgccggtgtgagaagcaaagatagtgaactccgaacagcttttacaactacgctgagtggctctgtaaccgccatcaaagactattatagtcagttcaaatctgccggttcatacttggtcgatggtttctgtgatggtatcagcgaaaatacttggaaagcggaagcaaaagcaagagccatggcagccgcagccgctgaagcagcggaagacgaattggacgagcattctccttctaaacgcttttacggaatcggtaactttgcaggagtcggtttcataaatgcgttgattgacaatgtatccaaggctggaaaggctggacgggaaattgccagatcttctattgatggattgaatgatatcatttccaggattgcagactatgtagatgcagacatggatgttcagcctaccattcgaccggttcttgacctatccgccgtagaagcagggagcggaaggttgaatactttgtttagcagaaatcaggcattatctgtcagcactgggatgaatgaccgagtttccgagatagaagttcaaaatggagaaagttctcctacaggaaatacctatcaattcacgcaaaacaattattcgcctaaggctctgtcgagaattgatatttatcggcagacaaagaatcaattttcggcgatgaaagggctggtgggtaacacatgattagagcagtaactgtaactaattatttgggcgaatcaaaaagatttgaattagcgttcccggaggaatccgggttcgccgttcaatctatcagcggattgggaccgagcaaagcagatattaacacgacagaaatctctacgaatgacggatcgctgtataactcggcaagagtaaattccagaaatattgttatgtctctgaaactgatgtttaatcctcagattgaagacacaagacatgactcctacaaatactttccgataaagaagaaagtaacgcttctcatagagacagataatcgtatttgtgagacttatggttatgtggaatcaaatgaaccagatattttcagcagcgatgagacgacgcagatttccatcgtgtgtcctgatccttatttttattctgctggtccggatggaactaataccactatcttctatggagtggaacctctgtttgagttcgctttttcgaatgaatctttaaccgagtccttgattgaatttggcgagattaagaatgaaaccgagcagacggtatattactccggtgatgccgagatcggggttgtgattaccattcatgccatcggaaatgtgagaaatatcacgatttacaataccgggacgagagaggtaatgcgtattgatacagataaattggagcagctaaccggttctggaatggttgccggcgatgaaatcattatctccaccattaaaggggataaatcaattacgcttcttcgaaacggtatctacaccaatattttaaactgccttgataaagattctgactggtttcagctatccaaaggcgataatattttcgcttatgtggtggaagaaggaacgaccaatgtgcagtttaagattgaaaacagaacagcgtttgagggggtatagttatggaattgattgttctggacacttttctgaaaatgctttctgtgcttgatacctttgagtctctgatatggacggagcggtattctgcctatggagatttcgaggtatatacaagcattaacgattctgttcttgaaatcctgaaagacgactactatctctggctgaaagaatccgaccagaccatgattgtcgaggacagaaagattgagtctgatgccgaaaacggaaaccactttacggtcactggaaggtcattggaatccattctggagcgccgcattatttggaagcaaacgattctgagcggaaactttcaaaatggaatcaaaaagctgctggatgagaatatcatcaatccttccgatgcttcccgaaaggtagaaggactgatattcgaggcatccacggacccggcgattaccggactgacggtagatgcacagtttaccggagacaatctgtatgatgccattaaaaagctgtgcgattccaagaatgtcggtttccgaatcaagctgtccgatgataacaagttcgtctttaagctctatgcaggcgcagatcgttcttacgaccagtttacgaatccatatgtcatcttttctccaaaatttgagaatgtaatcaataccaattatctggaatcaaagaagactttaaaaacagttactttggttgccggagagggggaaggagctgatcggaggactacaaccgtggcttgtgcatctggtgccggaacaggtttgaatcgaagggagctttatacggatgctagggatgtttcttcgaccgtggataatgaaaccttgacggacactgagtataatgcacagctttctcaaagaggtttagagaatctggctgagaacatcgcaaccaaatcctttgagggaaaggttgaatcaacgaggatgtaccgatatggagaggatttcttcttaggcgatatggtacagattgtgaatgaatacggaattgaggggaaagctcgggtaacggaattcattcgctctcagagcaaagaaggactcgactcgtatccgacattcgttaccgtagaatagcaggaaaggggtgaagaaaaatgagtgtcacttatgggttctataactcaaagaataaagatcggagatacgatgccattcaaatgtcaagcatttttgacgggatcatacgtgacggcattttgcagcatgttgggactgctatgatggtgaaagagtctactggcatgatggtgaatgtcggaattggccgagcttggtttaatcatacatggacgttgaatgacgccttgcttcctttgactgtaccacagtcggaagttattctaaatcggattgatgcggttgttttggaagtagatgctcgtgaatccgttcgtgcaaatgcgattaaaatcatcaaaggtacgccagctactaatccagcgaaaccaacaatgattagcacgaccgaccgttggcagtatccattagcctatattcgggtaaattctggagttacatccatccgtcaggcaaatatcaacaatgctgttggcacatcggagtgtccgttcgtaacagctccactggagaaaatgtccattgacgccttggttgctcagtggaaagaccagtgggatgcattttatgaaaaagagacatctgatatggaagcgacaaatgctttctggaaagaccagtggtcaaaatggttcaacgcccagacggaagaaatccagaaatcttatctggcatgggaaaaacaatggaatgactggtatgctgctcaaacggcagatatgcaggaaacaagtgctttctggaaacagttatgggcgacctggtttaacgagtacacaaacaataatacatctgaaatggctgcatggagagaaaatgctcaggcattgtttgatgagtggttccagcagttgaaggatactctttcggaggatgtagaagcaaatctggcaaaccagatattagagttacaaaaaaggacatcaattcttgaagaaattgtagaggggattcggacggaattcaccgtatacaacaatctttatgacaatggatacgagaactacgataatcttctcgattcatcagaaggaactatcattgacagtaacgtggacccgattgtggcgcgtgcatattccagctccttaattctggatagcaacggacagccaattgatggccgcgttattttttgtattaggtaaaaggaggacatatcgagatgaaaattacggattatcagaaggtccagacactagatgaaagcaacatcgtcttgattgatggtaacaatggaaccaaaacaattatggtgactgattttattaaatccttgattgggcttaccagttctcaggatttcatttccggtgtcaatctgtcggaacttacgcaaatcaatacgttgtctgcggatgataagttattgattggcaccgcagcagggaacaaagcgattggtgcggacgatgcactctttgcaattctggacgcttttgttccgaaggagcagcgccgcatgatttacagaggaaaaaatctggggagcgttattacagaagaccagaaggcaaatatcaagaacggaaccttcaaaggatttttccttggagattactggtctatcggcagctatacatggagaatcgtggatttcgattactggtataattgcggcgatacggctttcaccaagccccatctggttatcatgccggataaacctctttacaacgcacagatgaacgagaccaacattacaactggtggctatgttggttctaaaatgtataaggagaatctgagtcaggcgaaaactctggcagcgagtgccttcggcaatctgattcttacgcatcgtgaacatttgacaaatgctgtaacgaatggatatccgtctggcggctcgtggtatgattcgaccttggaacttcctaatgagattatgatgtacggttcacatgtttttgctccgtctggaaatggaacaattattccgaatagatacaccattagtaaaacccagcttgctctgttttcagtcgttccgaagctgatttccaatcgcgcaacgttctggctcagagacgtcgtttcttcggcttatttcgcttatgtgcattacgttggcgctacgaccttcaacggcgcttcgacctctcttggagttcgtccggtcttcgctattggttagtctgaatccgggggccctgtgcccccacgaaaaccgtacgcaggtgacaacaatctgtgctataaaataagaagaatctaaatgaaaggtgtgaatcaaaatggatgataagatttataagattactctgtccgatgaaactgttcttgataatttgaggttgaacggtaataactttatatcttcatcggaaatcgatgagtccgtttttgacggaaattgttcgatcgtaacaatcaacgatggtgaaaaggatgaagttcacatgaacatggaacttgtccagattatcaaggtcaatgacaaatattggtttgtcttgcgggatgttccagaaaccgagatggcctttgttaaaatgcagtcggatatcgaatatgttgccatgatgtctgaaatcgaactataaaaggaggaaacagttatggaacatagcaagaattacggcaaggtaaaacgctactacaatttgggtatgtggaatgaagtacgggttcggaatgcagtgaaaaagaactggattacggaagaagaattcaaagagatcacagacaaggattatgcatgagtgttcttgtgagtgatcggactgaatctaaattcgaagcaattacatattccatcgaattacatgatatgttgattgatttcatgcagcgtagtttcggagtaaaagacttggatcagcttgtccgagtaagatatgctcacggaaaggatgcgaaagaagatttttcaaggtatagatatttgatgctgaactacaaaaatcgtattgatcagttggcttctatgctgaccagtaatgttcgagcagcaaactctatctatccaactacgctacacgagtatgaacaaagaagagattatcagaatacagccatagtaaactgcgagcagcttttaaaagagctgcaacgaatcgttgagatatttgaagtggacgttaatctctacagtcgctatgttaaagctatcgaccgagaaatcggattgataaagaagtggcgtcaacgagataaccgaatcaagtcacagttaagagggtaatgtctaattatgcgtcgtttcttcggctaatttcgctaatgtgaataacaatggcaatacgaactacaacaacgcttcgaactctaatggagttcgtccggattctctgcctaaccaacagagaaggagacattgtcctttccgaatggataaatagcaaagccggacgcaatttactacggtaagtattgctatcacggtgaatgatttatgaactatgaggagattatctgtgacgccaacaacttgtatagggcttacaaggtttctgtcaaaaccagcaaatggaaggagactacccagaaattcatgctgaattttcttcgttatatcttttccattcaagatgatctgatgaatcggacccttcaaaatggaccgacacaggaattcacgctgtttgagagaggccgagtaagacctattactagtattcaaattcgggatcgcattattcggcatgtcttatgcgatgaagtcttgcttccggaagtgaagaagcatattatctacgataattgcgcctcgattaaaggaagaggtatctcccaccagcgggacaggttcgaagttcatctccgtaaatactatcggttgtatggaaatgaaggatggatattgttcggagacttttccaagttttacgataatatcattcatgaaattgccaaacgggaattgttaaagctgttcgatgatgacgaattcattgactggttgctaacacagatttttgacggatttaaaatcgatgtttcttacatgacggacgaggaatatgccacatgtatgtctgacactttcaacaagttagattataggaacattccagagtcaaagctgacaggcgaaaagtggatggagaagtcggttaatattggagaccagctatcacaagtcatcgggatttattatccgtatcggattgataattacgtcaaatatgtaagaagccagaagttttatggaagatacatggatgactggtatatcatgaatccgagtaaagaagaactctttgatctgctagatcatattcatcaaattgcagaagaatatggaatccatatcaataagaagaaaactcgaattgtgaagatttccagcacgtacaaatttctgcaaataaaatacagtttaacagattccggaaaggtaattaagcgaatcaatccgaagcgggttactacgatgcgcagaaagctcaagaaactcgccgtcaaagtgaaaaacgaggagataacgtatgaaaatgtagagaatatgtttcggggctggatgggaagcttttacaaacttttgtcgaaggaacaaagaaaaaatttgataggtctctatgaagatttatttgaaaagtcgattacaatcatcagcaaaaggatgatcataaccgataaaatcaaatagttatggaggatactaaaatggaaccatggtttcaaatggtggtgacgattgtgtgtgcagtcgtcgcctcttctggtttttgggcgtatatccagaagaaaagtgagaaaaaagatgtgaggacgcagatgctgattggtcttgctcacgatagaattatctatctgggaatgtcctacatcgagcggggatggatcacgcaggacgaatatgaaaatctgcacgattatctctacaagccctatgaagagatgggcggaaatggctcagctaagaaagtcatgcaggagatcaataagttgcccattcacaaatcaacctatattcaagaaaatcagtaggaggaattaaaatgatggaacagattatgaactatgtgcagcctgagttaatcgttgtggcgattgtcctttacttctgcggtatgggtctgaagcagactcaggcaatcaaggacaagtatattccgttgatcctcggtgccggcggcatcgtcctttgcggaatctgggttttggccacttctccattagggagtggtcaggagattgcaatggctatatttatcgcaattgttcagggaattttaatggccggtctcagtacctatgtaaatcagatcattaagcaggcaaataaagatgagtagcaagcggacagagcgtgaaaccgttcttttttttatttccaaaagagaggatgagagaatatggctattaacaaagtaatctatggtggagagacactgatcgacctgaccggcgataccgtaaccgctgataagattctttccggctttaccgcccatgacaaggggggggggcactcacaggtacttgtgaatatgacgtagattcttctgatgcaacagccgctgttgctgaaattcttcagggaaagaccgcgtatgtacgaggtcagaaactgacgggaaccatgaagaataacggagctgtgacaggtacaatttcttcaaaggatgaagagtacaccattccgcagggacatcacgatggttctggtaaagttgggatttcggcagcagaaaaagagaaaatcattccggataatattcgagaggggattactctgcttggtgtagaaggttctatgtcaggtacggaagatgccaaaccacaggcaaagacagttacaccttctacaaaggagcagacagtgcttccgaattctgaggaaggatataactacttatcgcaggttacagtcaaagcaatcccatataacgaaagcgagaatcccgctggaggtactacggtaactatcgggtaggagggaggcttaaatggctacaaataaagtcgtttacagcggcagaaccctcatagatttgactggggatactgtgacagaagaaactctgctaagaggttatacggctcacagagcagacgggacgcagattgtgggaacagcatttgccgattatccggagcgatattcgtttcttgaccctcttcaggattcaaatggagaaaagattcttgataattcgaataatgtactacagggtgaaacggtgtataaaaaggtgtagaaatgtcgtttacttcttgaatattcctatacttttgataaaagaatagctaaaaaacaaggtttcctgtttccattgaggagagcgctaaagcggggaaattttaagaaaacaccgattttgatttgatataatgttagcaaagaaaagtagttatgtccgtatagcatagcaaaaacccagagagtggcagtttctctgggttttctttattatgtattccgtgatggcacctccttcctgctggaaagagtcaacagcaattgttacaatatatctattataatgacatgatgttggggtcaaaaggtcttttgccccctttgataccggattactccgcactgcgtgctctcacaatcctcaaaaacattcgcaatccgctcatttttctgcgaaaaatggcttcttactcatgtttttggcgggtcccaagattaaaaatcttcatgcaagcaagcttgcatcagatttccaaccttttgaccctgttatcatgacattctgttacaattaaggtataatgagtggagactgtaaaaagggatagctcaggaggtacagatgaattctacttcgaaaaatgcagaaaacaaaacggtaaataatccaggaattgcagctaaatttataattctcagcctgattgggatttttgtgtttttcgttccgatacgggctggcggagccagcacaatcccggtcgaattcctggtaagttatctgataagcagttttaagccggtggtccgcctctatgcactggcggtgattttgatagccgccgttttgccttttatcagaaaaacgtggaaaaaagatgccttaactaccgtattcaccttcagcaaaatacttggagccgtttttacggttatcgttttttcgggctttggccctgagccaattatcagggctgaccatggtccctttttatttgaggcacttgttatccaggttggggtcctgctccccataggctccatttttctgacctgtcttatgaattacgggtttatcgattttatcgggcagtttctccggccaatcatgcgaaccatttggaaaactccgggccgttccgccgtggacgccgccgcatcctttatgggcggtaatgccataggattgatgctaacgaatgaaatgtataagaatcaaaggtacaataccagggaagcatctgtcattgccacgggttttcccgttgtctgtgtttcattttttattgttgtagcaaaaacagcctctatcatgcatttatggacacaattttttctgacttcgcttttagttacatatggagttaccgcaattactgcgcgtctgtatccactggcaggaaagtctgccggatactaccgggaaggagaaggggtcccggaagaaaaaccggacggacagctcattaaggcagcatggacagaggggctgcgggtctgccaggatgcaggaccagttctttcaaacattacaaaaaacgttaaaaattcctttggactaatcttggaagttttgccgaattttatgtccattggccttatctcattgatcttagaaaattatacacctgtttttgactggttcggttacttattttatcccgttacactgcttttacagattccggaaccactcttggctgcaaaagccgcgttcctgggcctggcggaaatgtatcttccggttctcgtagtggccggcgcaccggagagaactcgttttatcatcagtatattgagcatttcgcaggtcctgatgtttacctccacgatcccctgtatcacagctacggaaattcctgtttcactcagggaaatgatgattatctggctggaacggactatcctttccctttttctgatagtaccggcagcatatctgctatttctctggatacaatagattttatgtaatgacgaatctttccatcagagtgttctgccgggaagatatggttgaaaacatatggtcagtctgaccagaagggaaacaaatgaataaacgtaaggtaatcagaggtatcctgtttttacttacagttccaatggctgcaatgggagtgtttataggttttcatagaataagcttacagattgagcgccggaaatttccacccattgggaaattggtggaggtgaacggccatcaaatgcatgtatattcggagggagagggaggggaaacgctagtatttctgtctggttccggaactgctgcgccagccctggattttaaggctctttacagcagactgagcagccgttaccggattgccgtggtggaacgggccggctatggattcagtgatacggccgatactcccagggatattgatacggtattagaggaaaccagggaggctttgacgcttgcaggcgaatcaggaccctatattttgtttccgcattccctgtcaggtattgaagcaatttattggggacagaaatatccctcggaggtgaaggggattattgggcttgatgccgctgtcccatccctttatctgtcctggggggaagagacattaaataagagtgcagaaagcatggcaaaaatatcagtcttatatcaggcgggaatggtacggctgcatcccgagctatatgataccgatcctgcaatgaccggagatatattgtcagacgaagaaaaagcagcttataaagctgtggttatgaagagttttatgacaaagaatatggtggatgaggcaagatacgcttatgcgaatgccgcaaaagtggattccctggaaaagccggttcaaattccggtactttattatatatccgacggttctcaggttgtagagggatggagggacatcgtcacatcctatattgcatcatttgcagaatcacaatatgagtttttagattgcggtcactatgttcatgatgaaatgccagacgtaatcgcagaaggaagtataaaatttatcgattcactctctgattaaagggaatggttaatcaagcgttccatcatttaataagtgagaaaatgaaacattaggcgcaccgtccaatagacggatgcgcctaatgtttcaatgatttacataactgcagcggcctgccttatgaaagatctgcctgcataatcccgtccattagacagcgcaggaaacatgaatcgaatcggaaacatgattttctatatctaattagccaacaggtcagttaaaagtccgtggctgtggccttggaggcctaggcggctgcggaggcctgggggttcgggccttggaggccttggcggctgaggaggccttggaggttcgggccttggaggccttggcggctggggaggtcttggaggttcgggccttggaggccttggcggctggggaggtcttggaggttcgggccttggaggcctgggcggctgaggaggcctggggggttcgggccttggaggcctgggcggctgcggaggtcttgggggttcgggccttggaggccatggaggctgcggaggccttggaggtctgggcggctgaggaggtctgggtggctgaggaggccatggaggctgcggaggccttggaggccttggcggttggggaggccatggaggaagaaaattcccctgaacaaccactaacaaagcattggattgaggagggatgctcatagtcatggcggacgagaacacgacgtttacccacattcccctttgaaggcagcatatgcacattttttggccgaaagatgttaagatactggtatttctattgagatttaatcttagaatttgtatggaagtgttattcccttcgcgaacagcataggagaccaggataaatccgttagaattatcggtacatgaagcttcttctacaaaggcgttattgatccgcaggacatttccctgctgaattatcgttccgcgtggatcgttgctcatataggagtcaccataaaagattttattacattgtatgcaaaacagaaataatctgtgaggtcaaagcaatttgcaaatagcctttccttaccggtaaactgcagttttgcaacgattgcccgttattgagatattgtaatttgatgtgaatttaatctataatttacttaagtagagatggaacaggaaaggagtgaaatggaaaatgagagccagaatttttgataaggccagtcaaaccttttatcggtcagagatttatgggattgtaaatttcggtggagacaggtatattgccggaaaatgtgagggtggtaaacagatattttatctgatagactatcttgactatacatcggagccgccttaccgggtgaatgtcgaatgtattgacagtaatccccttcctgaggggatgcagtgggaatacagacagaaagaggagctgttagaccttaatctaatcctggagaaaaaataccatcatccgccgttattatctttcaggggatgcccgtttttattggagcagaaggaatggctggcagaactgacagccagacggaaattgcctgattacagagcggatgcagtggtgcccgatacgaaattgcagggatggaattacatagaggatagctgtgatataaacagtttgatggattatttcggcggatttcatgattccgttataagggaaatccactatgaaagtggcgattatatggaaggcggaacaatgtatttgtcaccctcctgtgccaaaaagctgagaatggtgtttgacagtagctgggcaaacagcattgagatagtttttgagtcggtcaggctgctccggctggtaccgccgggagaaaattatttgggtgatttatttaatgcatctattttcattgacaacttagaagtgtatttttacgatgaatatctgaaggaaaggccaaaatctcatgatggtacatgggttaaagcgttgggaatgagatggcgggtgattgtataaccgctccgcggagaatcccgcgagcgggattctttgatgaacagattcatgatcggacgggctttgtattacccatttccccgggagccatatcaaatatatccccggcagcggaaccgttattcctcccacaattgccgctgtgtccgtttgaaagaattgttcagatgacgggccacggcctgttccgccttttcaggattacggtcccgtatggcggctccgatagccagatgttcttttaaaacgatttcggcatcgatagagttgttatatacggattttacctcaaaacggagatagttatttagaagcatcgccgtctcgcggtgcatccagccgttatgggtggcggcggcaatgtcacggtggaacttatgatcgatccggtagagggagcggctgtccctggattccagattgtttttgagttcatccaggcaccggatcagtccgtttatttcttcgtccgtactgcgcagtgcggccagtctggcattattcttttccatcagcatacgcatctccagaatatcttttgcgtctttttctgtgacagggactaccttcacacctttaccgcggcagaaacagacgtatccctctttttgcagctcaagcaatgcttcccgcaccggagtacggctgattctcaattcgttgcagattgcttcctgagagtagatggctccaatacggaagcggttgtaaaggatggcatccttgataagttcataggcctgttctttaaatgtattcgtttggatatatcctccgcccagcagagattcatcgttcataattattaaaccctcccattaatccgccctttggagcagaatatattacatattaataagagtagtataacgataaaacagggaaattgcaatgaaatcagcaggagtgtttggcgagaattttaaattatacaaacattccctgggtaaaatgaccggaaaattgtatattaagttaaaatccaaaaaaattattgacaatcgtcagattcgtgtctatattatagatatgtagaatgtaatatgtaatatattactgagaggggaggcgggttttttcagtggcatgttgcaggaactgagtacacagtgtagagcaaataaaggaggagaagtatgttagtcgcagtatggattattacgttcctgttaattattggtatcggagtatacgcaggtacaaaaatcaaatctgcaaatcaatggtcgggcggagacaagacgatgggagccgtttctctgggctgtatatttgcggcgtggcagattggcggcatggcagtggtaggcgcagcgcaaaacggctataatttgggaatttccggcgcttggtattcaattgccgggtcgttctattttatcgcgctggcagtatttgcaaagattatccgggagagaatgccaggggaatcagtgcctgcctatttacagaaccggtttgatacgaaaaccacccgcctgtattcctatgcctggattgtttatggatttctttatattccgattcagcttaagacggtagccagcatcatccagatcgtgctgccgggcatgaacatgatggcggcgatgctgattggcgttacggttgccgtactgtatacaagcttttcaggaatgaaaggcgcatctgccgtaggccgcgtagtttgtatcggcatctatatattgcttattattttcacggttacgaccctgtccggctttggcggactcggcggtttattcgaacagcttccggaaaattataattctatggggaatatgccgacacagagaattattgcatggattctgggcggctgtatcagtacggcagtcatgcaggcagtgcttcagccgcttttggcggccaaaagccctcaggctgcaagaaccggttcaattctgggctatctgattgcggcgccgatctgtttttttacggcaatttgtggtatgctttcaaaagcttccggtgcagacctgggcgacggttcgacggcttttgcatatgcaattaaaaccttcagcagtcccgtgtttgccggaattatatttgcctttgcgaccatgattatcgctgcgacaatggctacgatgatgctggcgacgggcactattattacaaatatatacaagacggaaattgaccggaatgccggagatcagaaggtattaaagatatccaaatcggtaacctttatttttgcctaccttaccctgatacctgcatttctgattcccagtcagtcacttaccaacctgtttttaacactgcagcatgtagcggcggcgccggtcagcttttcgattctggcaggcttaatgtggaaacggtgtacgaagcagggcgcattctggagcatgctgacaggcatgatagtggggatttcctggatgcttcttgggttgactgataagatggaagcagtttatccggttgtggttgttacatattcagttggaattattgtctcgcttatgacgagcaaaaaggagatagtttaatatgtgtcaggagcaaaagaaacagatttatatgtggccttctcattgggagaaaccggccgcacacggagattacggcgctgtgagctgcaacaacagttatgcggcgagagccggtctttggatactgaaaaacggaggcaatgcctttgatgcggcggcagccgtttcgctggcattgtcggttgtggaaccgcatcattcaggaataggggaggctgcttcagccttctctactgcgaaaaggagggccggatttttgccctggacggaagagggacagcgcctgtgcaggccggacctgatttgttcctgaaaaatggggaagtgcaggatgaatggaaggatcttggcggacagtcggttgcgattcccggattactgaaaacgatggaagacatgctgaaacgatttggcacaatgacgttaaaagaagtcagcgttcctgcaatccggtatgcgaaagaaggatttggcacgagttacaccggcgccctgaccatgtatgatgattccgttaagagaaaaatgagaatatcggaaggattccggaaattgtatttgaagaatgggcaggaattttaccggtttggcgatatccagaggaatcctgagctgggagtgcttcttgagacgatagctgagaatggaaccgatgtattttaccgcggggagatagcgcagcggattgtatcggtgattaacagcagggggggatgctttgaaacggcagaccttgagaattacgctcctaaataccgtgagccggtacatacggattaccgcggctatgaggtggtgtcgtttgcgcctcccagcggaggctgtacgttgattgagatgctcaacatcctggaacagaatgatttaagggccatgggacataatacggcagacagtattcatgcaattgcggaggcaatgaaattgggttttgccgaccgaagcatcgctttgggagatcctgattttgtgtcggttgacacggagcgtcttacctcgaaagcttatgcggcgaaacggttccggctgattggaggacatgccggagaatatgcaccggcagagggcattgaggcaaaagagtatccgggtaacacctctcatttttctataatggatcgttttggtaatgcagtttctcagacgcagaccgtacgggactggtttggaagcggaattgcagtggagggactggggtttgtactgaataatgcaatgtctgatttttcagccgccgccggggccatgaccagccagggcctggcttatggaaacgcgaacagcattgcgggaggaaaaacgcctctgtcaagcatgagtccgagcattgtcctgaaagacaaaaagccgtatctggcgattggttcggcaggcggaccgagaattattacaggaactcttcagggaatcattaatgcaattgattttgatatgaatccggaacagcttgtcaatgctccatatgtgaactgccttacaagggagcagggactggaggcggaattcggtatttctcaggatacgctcaggctgcttgaagagagagggcataaacccgtatgtatagaagcggatcaggcgatgagcacaatggtcaacagcgttatgcttaaggatggggagtattatgcagccggaacaaagagagtggacggctgcggcggtgttctcttatcaaatggaaatattattttagaagggatcagccaggagatttcctgacgcaggtttggctgtttcgtataggccgccggagacagcctatacgaaacggtgaagaaagcgaagaattttactgtgaaataaaaaagtttccgcttgtcggcccctgggctttcagcagaaactttttttatatggtttattagttgttaacagttacgttaacagcctgtaatccacgagcgccttctgtaacttcgaaggaaacggactgtccgtcttctaatgttttgtagccgtccatagcaagaccggagaaatgtacgaaaatatcgttgccctgctcgtcgctgatgaagccgtagcccttctgtgagttaaaccattttactgtacctttattcatgaaagatacctcctattatattatttttattatattttctatataaaacaaaaaatcacatatctttgtaaatcaacaaaccgatttacaacaaatatgtgaaatcaaagctttatcaaaaatacgagtttaatatagcacgctctggcggttttgtcaagaaagatttaaaaatttacatcagatttagcaatattttagtataaacgcgatttgccctgccggaaccctcaatcgttactgttcaccctccgccaaaaagcggcgtggtgcgaacaataacacgcttcgcgatgcacagaaacggcaaaaacgccgtttcgcgacgtggaactcgggattttcgtgcagaatacgcacgaaaatacttcgcggaacacaaccgtgtgaacagtaaccctcaatccgcatttaactgtgttaaaaaaatgataaaattgcaatgtttttccatttattgtacaatgaaaatggaaaggttactgttaatgtgagaaaataagatgaggggagaaagagttatgagtaatacgaagaaaaagttaccgttggctttctggatttttacaggtcttcttctgggtatcttggctggtatgggattaatgaaaacgccggagattgcgaccacgtatattaagccattcggcaccctgttcctgaaccttgtgaagtttattgttgttccgattgtgcttttctcgattatgtccggcgtgatatccatgagggatatacggaaggtggggagcatcggggtaaaaaccattgtctattatatgtgtacgacggcattggctgttgtgattggcctggcgcttgccaatgcattcaagggaagcttcggcgagatatctgcctcagggctcgaatatacggcaaaagaggctcccagctttatcgaaaccctggtcaacatcttcccgagcaatgtgattgggccgatgtcggaagccaatatgctgcaggttattgtgatagcgctgttttttggcttcggcgtgatttcagtcggggaaaaaggaaagccgttcgcagattttgtggagagcgcgaatgcaatctccatggtgattatgggaacaatcatcaagttcagcccaatcggtgttttctgcctgattacgcctgtagtggcggaaaacggaccggatattctgggcaatctgctggcggttctgctggtcgcctatgccggatatatcatccatatggccgtagtatattcgtttacggtaaaaacgtttggtaaaatcagccccctcaagtttttcggaggaatgtcgcctgcgatgattatggctttttccagcgcttcttcggtgggaaccctgcctcttaatctggaatgcgtggaaaagatgggcggaaagaaagaagtggcaagcttcgtcctgcctctcggagctacaatcaatatggacggtaccgccatttatcagggcgtctgtgcaatctttatagcaacctgttacggcattaacctgactttgggacagcagattacaattatcctgacagccacgctggcatcgatcggaacagcaggggtgccgggagcaggaatgattatgctggccatggtgcttcagagcgtcaacctgccaatcgagggaattgctcttgttgcgggaattgacagaatattcgatatgggcaggacgacggtcaatatcacaggcgatgcggcatgtgcgctgattgtttcgaaaatggaggaaaaaagcgcccggcggtgaaagcagttaaaaacaatacatagaaaaagacaggctggaaggagacggagtttaacggataggagccggcccaggaaggacattaccatgtgaaaacggtggcctgtacgcagaacgtgcaggctatcgttagttgtcagaatgtacggcccatgatagaatgataccagaataacaaacagggagaaatgccatatgaaatctttagttttagcagaaaagccctccgtggcccgcgatattgcccgcgtgcttaaatgcggcaagtcattgaacggagcgatggaaggccaggaatatatcgtaacatggggactgggacatcttgtcacgctggcggatccggaggactaccatccgcgctacaaagagtggaagatggaggatcttccgatgctgccggatgagtttaagctggaggtcatcaaacagacgggaaagcagtataacgccgtcaagacacagctttaccggaatgacgtgaaggatattatcattgccaccgacgcgggccgtgagggagagctggtagcccggctgattctcaaaaaggcgggcagcagaaagcccatccggagactttggatatcctctgtcacggataaagccatccgggagggatttgcccatttaaaggacggaagggagtacgataatctttatgatgccgctatgtgcagggcggaggccgactggatggtgggaattaatgccaccagggcgctgacctgcaagtataatgcgcagctctcctgcggacgtgtgcagaccccgacgctggcaatgattgcaaggcgggaggaagagataaggcaattcgtccccagaccatatttcggaatacggggagaaagccgccagccggccctgacgcttacctggcaggacggagggtcaaagagcgcccgctcctttgaccggaaaaggatagaggagctggttcagggacttcagggcaaacaaggtgtggtggaggatgtgaaacgcaccccgaagaagacgtacgcgccacttctttatgatttgacggaacttcagcgcgatgccaataaacggttcggctactcggcaaaggagacattgaacatcatgcagcgcctgtacgaaaaccacaaggtgctgacctatccaaggacagattcaaggtatctgagcgccgatatcgtaccgacgctgaaagagcgcttaagagcctgcggcacaggcccatataagaagctggcggggcggcttacgggccgtcctctcccggaaaagctgtttttcgtggataacggcagggtatcggatcaccatgcgattattccgacagagcagtttgtacagctggaccatatgacagtggatgagcggagaatttacgatctggttgtccgccgtttccttgccatactgtatccgcctttcgaatatgagcagactgctctcacggtaaaagcgggaaatgaatgctttactgccagaggagaaattgtaaaggcgtcagggtggcgcgaggcatatgaaaatgaaagagaagaagaggaagacgcagaggggaggaacaggatgtaaaggcccagaagcttcccgagatcaaaaaaggagatatcctaagcagtattacgttccgtatgacggagggaaagacaaagccgccgtcgccgtttaacgaggctacgctgctctcagcgatggagaatccggcagcctacatggaatcaaaggatcgggagatggcaaaaacgctcggtgagacaggaggcctgggaacggttgcgacacgggccgatatcattgaaaaacttttttcaagcttcctcctggagaagcgggggaaggaaattttcctcacatctaaggcgaaacagcttctgaacctggttccggaggatttaaagaaaccggagctgacggcgcagtgggagatgaagctttccaaaatagcaaaagggaatttaaagcgggacgcttttatgaaggacatcagggaatattcgggtgaactgatttcccagatcaaagcaggggagggcagcttccgccatgacaacctgactaatacgaaatgcccggtctgcggaaagcgaatgctgctcgtaaaagggaaaaacagcgagatgctggtctgccaggatcgggaatgcggccacagggagacgatcgccagaacctctaatgccaggtgcccggtctgccacaagaagctggagctgagaggaaagggcgagagtcagatcttcgtctgccggtgcggttataaagaaaaactgaaggcattccaggagagaaggaagaaagagggcgccggggtttccaaaaaagacgtggcaaaatatttgaaccagcagaagaaagaggccgaggcaccgcttaacaatgcgtttgcacaggcgctcaagggaattaagctggacgattaacggccggaagcaaattattacattagatgacagaagcaggggacaaatggataagaataaaatcctgataatcgaggatgaggcagccatccgggagctgctctgcatgaacctggaagccgtcggatatgagacggatacggcctgtgacggtatacaggcggaacttaagatagaggaagacaggggagggtatgatctggcccttgtggatgtgatgctccccggacgcgacggttttgatctgatcggaggctgaataaaaaagagattccctgcatatttcttaccgctaaagcggacgtggcttccaaggtcaggggctgcgcctggggcggaggactatattgtaaaaccgtttgaaatgatggaattatttgcgagagtggaaaatgtcttaaaacgcaggagtaaactgaagaatacaattgaaattgacggctgccggattgatttgaccggccataaggtgtttgaggagggcaggagattcagctgaagccgatggaatacgatttgtttctttttctatgccgcaaccggaacgtggcatttacaaggaaccagcttttagacagaatctggggcggtgattatgagggagagacgagaacggtggatgtccatgtcgccagtttaaggaaaaaactgaaggcagcatccaggatacagacaattcccaagctgggataccgcctggaggtttaaagcctatgaagcttacaaaaaaactgctgctcatcatttccgccagcctggccggagccctgctggcagtcagtattctggcaatctggcagatgcgttcccagagtatttccatggctgtggacaattacgacaggcagatggactcaatttcctatgtgttttctgagattggcaccagggaagattttgaggccatggggatatcgccgctgaggcgtatttgaaataccagttccgaaagtgctataaagatggctatgctctgctgaaagggagtgagagcatcgtcaatctgaccgattatgagattctggctcccgatatcctgaaggagccgtatctgattcagcatctgggaaaacaggcagtgctgctgatgaagagagaaatcacccagtttcccggctacgatgtgctgatggctcagaatattacgccctattatcaggaaatagaacggcgtgccgcgtatctggccctgctttgcacaggtgtctggctgataaccgtgaccgccgcttttttcctgacccataaggcgctgatgcctctgaatgagctgacaaaggccgcggtaaagattggtaacggaaatctcagcgagagggcgccggtgcaaagccaggatgaaatcggggaatttgccgaagtctttaaccagatgacggaaaaagtggagaaacaggttgaagatctgcagctgctcctgggggctctggcccatgagataaagactccgatgacagcggtgattggttattccgacagcctgctgcacgtgaatttatccggggaacagaaagagagggcgcttaaggagattcaccatgccggcctcaggctggagcgtctgtcttccaagatgttaagctttctcggctcttatgagaacgatgaaatccggtttgagacaattcaggtaagagaattattgcagaacgcgctaaaagataccaagccaatttgggaagaaaaacagattcaaatcgagtggaatgtgcaggattttccgctcagggccgacagggagcttttcctttctcttctttataacctgattcataatgcggtaaaggcatcggagcctttcaaaagattgtggattgaagcagataaagagaagaacacgattgtgataagggacgagggctgcggcatacctgcaaaggatctgccgcatgtgacggaagccttttatatggcggataaatccagaagcagaagcgagggaggatccgggctggggctggccctttgcagaaaaattgcatcgctgcattccgtcaggcttgagataaagagtccctgtgcacccggaaagaatacgggcggaaccgaagttaccctgcaccttcccgtttacaaaacgtttacaatttgatgaggattttgacgccgcaggaaggtatactgtgagtacttagcaaagaaggataaaggagtggagagtaaatgaaaagaaaattatcaatccgtctgcttcttgtgacggctgctgtgacaggactcgcttcaggctgcggcacaggcgcgcaccagcaggtaatcggtgagaaacaggaaacacggaccgagcaggagaatataacggaaggcacatcggctgacggcgcggccgaccggcatgaactgagagtggcggagcaggtacaggctccggagcgttataaaacagaggtgaaggataaggggctgtatctcacggcagatgcatcagttgaggttcctgatttggatcgtgccctgattaagaagtcacgcgccgttaattttacaaaagaagaatacgagaaggtaaaggaagtattatcgaaagaactggagcttgaatggggagaagggaagacggaccggcgctatcttcaatatgaaggaggagtctgggactatgtggatgttacggatgccgacaatgcggaaataatcaagaaggcggaaggcggcagtgaaaacagcgcctatgacgaggtcacgaatgtgagcgggaccggagcggacggaagcagttaccagctcagctaccggacgggcacaggggatatcacaccgcccacaacgctgatttggctgtcaaaacgaatagaggatggacgctacatcgacaaaacggcagtcatccataagagcggggacgaagaatccgccgcacggtccgagcttgccggacagcttcaaaagaaagcggaggcgctggttgcagaagccggattcaagaactataaggtttataacacaagatggagggaatcgttctaccgcacgaaggaggggaatttatccgaatttgagtactggctcacatttacgccttcgatagacggaatcggatgcacctggacgaatgccgacctgatgggaaactcagtgctgaacggcccctatatcgacctccttttaaaggaagacggtacgctgaactatatgaggataatagggaaggaagagatagagatcagcggcgcggacggaacgtttcttctcccctttgaggccattcaccagctcttcgaacagtattgcaaagacttttatgggaacagcggtgaacaggagggggaggcggttctgaaggacgggaaaacgcagataggccggacagaagccataacccgcctgaatgtcaacagtgtcaggctggagtatgctttcattaaacgggaaaacgccgccgccaactcggagcaggaactgatacctgtatggaacttttacggaagcatatcacgcggcccgacaatcggagaggaagacagaccgcagggcatggtggagaatgtaattctgccggaagggattattctttccatccgcgcggatgacggccggattctggtggaataaatatgttgatggaatgttaaaaaatgataagataaccggcatcttttattaatacaataataacctatctttcaaatttctttatatttacaaaagaaatcagacgaaaatgaaaggttaattaaaacactgataaggaacggccaaaccccttccctttttctaaaaccagaatacaatgaaggtaggttgaaaatagaaaaaggagggacgacatatgaacctggttgctattttacttattattgtatatggcatcatcggaggactttccactgcggttcttaccataagcctgccggtgctgattatctggaaattttacaggaagtttaaataccataaggcattgaccgattagttaaaaagatgccgccaagaatgaaaaagaatatggaagatcggataacatgagttgtcagcagccgaaagaacccggcggcgggcaactcatgttttttcttttaacaggaaagttctcctgataaataaaccgcgccgcggtgaaaagttcgcaaagcgtgttattgttcgcggctgcgggcgaagataaagtctgcggagcacgctcccgctctgtgaaacgcatcgcgctgctaagctcgacaggacctcgcaaatcagcgatggatttaggcggcatccgcagactttattttcccctccgccccaaggccatgttttcgccggacgaaagactcaaggcctaggggatcgcccgtccgccggcctgcggccgctaagagcttccgtgggcgggaaatacgatatgccatcaatgagatttttaaaaattgcggaagattttgatatcagcctgccggaaacacgtagtggccgcgacagggtcctccccatttaaggttggaaacaatcagcggccggaacggaccttgtccggtgtgcgaaaaccttcgcctgggtcatccgtccccggcgaaaacctgcccaggggaagtaggcggaatcaattgcggaggggacatgggagtccgccggtgcttggcgaggtccctcacgagcttagcactgttgcgcactccaaagagtgcaaacggtccccgtagcaattcattcctgtcggattcccccacacgacaccctccaaccggggacggaagactcagacagaatccctcaccacaccggacaaggtccgttccggacgcgtcctccgggcctcagttaaatctaaatgacacaaccgtgtgaacagtaacccggtgctgactctttattcgataagtccgaaagaggtatttcacggattcagcagacatggtataatttagttataaacaaaacaggagggagccatggatttagatttactgaagctgttcggcacactcaggccctacggcagcagaacgaatgaccgcctctttttacgctccataagacgcagggcggcctatttcataaaacactccccggagtaccgtgcaatctgtgaagatgtcggtttccatccggccgttttaaaaaacatgaaatcgttagagcagattccggtcatccccacactgtattttaaacggaataaaataggaatcaggcgtgggccggcagtggaagtcacttcctccggaaccggggaacggccagcaggcttagttattccgtctgggagatatgtcttttggcggcaatggccgtcaatctcgggcggattcacgggctcttttcccgcaggccggttcattatattatgctgggataccagccctcaaaggaaaacaaagcggtgatttcaaagacagcctggctgtccactctgtatgcaccggcaatcagcaggcgttatgccctggaataccggaagggcgtaagaggagaaagcggtacctataccctcaatctgccgggaatactggagaatctggcgcgttgtgcagagggcacacatccggtcaggctggttggttttccctcctatacctattttttactcaaaaaaatgaaacaggaaaacataatatgccggctaccggggactcccgtgtgatgcttggcgggggatggaagcagtttgagaaagaggaaattccaaaagaggaattatacacgctgatttgggaggtccttgggataaacaaaacccgggtgcatgaatttttcggcgcggccgagcatccggttctctactgcagctgcaaaaaccatcattttcatattccggcttatgcaagggttttgatccgcgatacggagacgctggaggcgctttccaaaggccgcgccgggctggtaaacctgttgacgcccattggttcggatctgcctctgatgagcgtgatgacggatgacattggggtgctgcatgacaaaaaagagtgcggctgcggcattaaaagtgattatctggagattctgggaggacgggggcaaagggaatacggacatgcgccgccggagcggcggactactggcagggaatataacgtccggcaaaatagcagaaaacagagcggtacaagcggcaaattctccggtagtgtataaaataaagtaaagccaacgaaggattatttttatgaagaaaagaattccgctggaaaaagcagcccttcaggtctgtattgatagtgaaaagcagccccgcatttatcagttaacgccccgtcagggcagaatcaagctggatgaggtgcaggacgcgccggtagccatgtacccggcgtcggtatgcaccgtgaattttgataccggaagatgggggattattcgggtatttattgtaagaccggaaaattataccggaaatacaggcactattttttacattcatggagccggctgggtattcggaaatttccatacccatgaaaagctggtcagggaactggcggcccgaaccggttcgctcgtcgtatttccggagtacagcctatcgccggaggctaaatatcctgtcgccatagagcagtgttacaggctgctctgttcgcttcctgctttcacatatggtacgggagggccgtttaaccttgaacggctgaccgttgcagggacagcgcgggagggaatatggctgcggcgttgacactcatggcaaaatacagaaacggccccaggattcacaggcagcttttgttttatcccgtaacggacgcctgctttgatacctgcacctatatgaaattcgcaaaagattattatctgtaccgggacggaatgatatggttctggaaccagtatacggcgaatgaggctgagcgcgcccagataacggcgtccccgctccgggcctgtccggagcagcttgccggactgccggcagcattaatcataaacggggaggcggatgtactgcgcgacgacggcgaggcttacgcctctaagctgctactggcgggagtagatgtgacggcggtcagaatcagggcaacgatccatgactttgtaatgctgaatgccctcgaccagacgaatgcatgcagggctgcgatggatttggctgtaagctggctggaaagaaagtaataaaggaagataccggagagaaagaggaaatcaagatggtttttctggatggacaaataatggattttgccgataatatcgaggcggtaaaacagataaaaaagaagattgtaaaaacgctttcgggagggagcctggatccggaaatcgtgattcaggctgcagaccgtctggctgccgatatcatgtccggcaggtcatacatggcggatggggaatggcctgcgataagccgggattatccgcctgcttcttttgccggatatttcacggcagattctctgaggaagaaacgaaggctggagcttccggaaataccggactgcccggaggagggaaaacgcttttttagagaacctctgggagtgctgctgcatatcgcatccggaaattcggccggtctgcccgcatacagtgttctggaaggactcctggcaggaaatatcaatattctcaagctgccctccggggccgggggcctgtccctttatattttgaaaaaactgacggaatacgaaccgcggctgaaagaatacatctatatactggacacgccctccggtgataaaagggtgatggagatgctgatgcgtctggccggagggattgcagtgtgtggctctgatgagacggttcgggcggtgagggagagcgccccggttaatgtcaaaattatcgaatggggccatcggctgagctttgcttatattgcagatatgaatgtcccggaagtaaaacttgaaggcctggcacgccacattttcagtacaaaccagcttctttgcagctcctgccaggttgtttatctggatacggataactttgaggaggtaaagaagttcggcctccggttctcattagtgatggagcgggaaggaaggcggtatgggaatccgctgtttatcaggggaaaaacagccgttgagaggctgacccaaaagcttgagcttgccggaggaacggaaaggaacgggaagaaaggtccggccgaacgctatatatacccggccggtcatgggagcgtgacctgtataaacgacagcagactggaattatccgggcagttcggccatgtcctggtcaagccgcttccccaaaaaaagattttctccctttatccatgtaaaagacaccttcagacagcaggaatttatccggaaagcgctagtctgataaagacattggcaagatgcggcctgacgaacttatgcagtcttgataatatgggcagttttggaatattgagttcccatgacgggacattcgcattgcgggaatacacgaggattacggaatataaaacaggaagtgggggaggattatgaactatctgattgggattgacgtggggacatcggcgacaaaaacagtgttatttgatgaagaagggacggttattgcttctgcctctaaggaatatggaatgattcagccgcagaacggctgggctgaacagaatccgggggattggaagaatgccgttcttgagacgctttcagaagtcagggagcggtcgggagttccggccggggcgataaaaggaatcgggctttccggacagatgcatggccttgtgatgctggatgaagacaatgaggtaatccgttcctccatcatctggtgcgaccagagaaccggcggacaagtggaggagatgctgcagattatgccgcgggagaggtggatagagctgactgccaatccgccgctgaccggctggactgcggcaaaaattttgtgggtaaaaaagcatgagccggagaattatcaaaaatgccgccatatattgctgccaaaggactatatcaggcaggtgctgaccggcgtgtttgcaacggaagtttcggatgccagcggcatgcagcttttggatgtgcagggccgctgctggtctgaggaggttctgcgcactctggatattgacaggtcccttctgggggaggtatacgaatcctgtgagataacgggaacccttctgcctgagatagcggagcggacaggcctgaacgcggatacgatagtggtcggaggagccggcgacaatgcggcagcggcggtggggaccggtgttgtagcggacggcgccgcatttacaacgattgggacatccggggtggtatatgcccacagcagcaagcttgccgtagatccgaaggggagggtgcatacatgctgctgtgccgttccgggagcatggcatatgatgggagtgacccaggccgccggtttatccctgaaatggttctgcggacaattctgccaggattatatggtggaggcggagcgtcagggaagagatgtctatgatttagtgaatgaagcggtccaggagataaaacccggcagtgacaggcttatttacctgccctatctgatgggagagaggacacctcatttggatccggactgccgcggcgtatttttcggactgtcggccatccatacgaaaagccatcttttaagagccgtcatggaaggagttgcgtattcgctcttcgactgcagcgaaattcttggggatacgggtgtgaaaatcacagagatgatggcctgtggcggcggagggaaaagtcctgtctggaggcagatgctggccgatctttacggctgtccggttaagacggtgaagcagcaggaaggtccggctcttggagctgcgatactggccggcgtgggctgcggtatttataacagtgttgagacggcctgcggccgtctgctgaggatgagcagcagcacggagccggaggaagaaaacacggtgctctacagacagttccactgtctgtaccaaagactttatagcagtctgaaagaagattttaaagagcttgccgggttgtaagacggtgtgggaaggaaaaggagacgccaatgatacctgctatagaaaacagacgaagcatggcgttaacagtactttaccgtaaacattcaaatccctccttcatatcataaagaaggagggatttattatgtcagaacgttcatacacacccagagatatttttgcagatattcttgaagacaatgaaccgcaggctgttgcctgggtcaggggagatgccgctcatccggccttaagcggcatgatcaaattttataagacgccgtatcagggtgtacttattgaagccgaagtattcggccttccggatcagggacggccgtctcagagcaattactatggattccatatccacgaaaatggaaactgcagcggtacggcggcaagcccgttcgctaacgccggttcccattacaacccgtctaaagcacctcatccgttacatgccggtgacttcccgcctctgctgagcaatcaggggtatgcctggatgtccttctatgataagcggttttcgctccaggatattctggggagatccgtaatcatccacaaccagcccgatgactttacaacccagccgtcaggtaattccggcgcgatgataggctgcggcgtaatcatgaagaattaggtcactgttcacacggttccgttcctccggacttcagtttcaccagcagcctgcgggtcaggattaccgatgtgatggtgaaataaatttccagcgcgctgctgacgattccgaccagaatcaggaggaaagccgaacctgctacgatccctgcccacgcaaagaggcaggaaccgtagcgggacggatctgtgcggtattccttcaggataatcaggaaaagactagccagcagaagaacggcggccataaatgcaaatataatatgaagaaacgatttaaacggcatctcctccggcagatagggggtagtgatggcacaaaaaagcaggacaagtgaagagggaaccaggaaggttccttttggtttctgtttcataagccggatagcggtgcggagagagtagtagaaatacgctcccaccagaactccccacagaacgaaggcgtctttcctgtgcagatagttgccgataacggaaaaattcgttgtaaaccacccgtatcctttgacaaaaaggatggtataagccggaataataatataagctatcaggttaagcataatgcaaaaattcctctccaaataaatttacaaaagagtagtataccagaatgtaaaagatatagggtgaaatttttatagtatttttgttaaatttttataatactgtaaattttgttttttaacagctttataaaattccgtaaataacctgcctgtacaggctattgtcgctcataccattaagcaggttttaacctaattatccgttaattctttaattgctttgactattctgtttaatccctcttccagcatgctttgcgggcaggcaactgtcattctaaaatatccggctccggattcgccaaatacatgaccgttttcaatcaataaatcatactttgttatcagtaattcaaataatttttcgtaatctacatatgctccaaaatttatccaggctaaaaacgtcccctcaggctttttgtattttactttcggaagatgtttattaagataatccactaaaaaatcaaagttctgctcaacatattccatgacttcatcaacccaatattcgcatttattataagcggtctctgctaaaaccatatcaagcggcggggcaaaactaatataatgttttttccttgtttctttgtgccatatttgttttaactcttcatcatctatgattatttgagaaattggtacccctccgacattgaaggttttgcctaaagccacagcagtaataattttactgtaatcacttatcgtcttaagtggatgatgcgttacattagctcgtgttaaatcgcaatgcagttcatcagagaaaattaaaacttcgttttcttgacataaatcgactattttctttaattcatcctttgtccataccctgcctaccggattatgcggtgaacataagattagcattgtattattaggatcttttaatttgttttctaaatcaataaaatcaatgctataattctcatcgttatttattaactgattattaactatttttctatcagttccttctattaactcggcaaatggatagaatacaggctcctgaataataactccttcccctttttttgtaaaacctcttaagataaaacccaatgcaggcagaacacccggcgaataaaagatggaatcttttaaaatggtccaattgaatcgtcttttataccatccttgaacagattcaaaatagctgtcgcccggcatagaatgtccaagaaatccatgctcaacccttttaatcagtgcttcagttatttcatcagcaactttaaattccatatccgaaagccatagaggcaatgctgtgtctgatactctgctgtccacaaaatctttatgatcccatttgacacaatccgttccttttctattgtatagcttgtctaaaattaattttcccatagcgacgctccttttactattttatatatctcttattatctataacacagaagattgtgaggaacaacttaacagaattccaaatagagggcgataaaaaataagattgtgtcatcacagtagacgtttacacgtaatttagatataatgtgtatataaaactgctttactacgctaaaatttatgcttttagaacctttctgtgaaacgaggtggatttatatgtcggaatacctgatggaattaggcagcattcttagaaaagtgagaaaattacgtggtttaactatccaacagctagcagataaaatccagaaaagtaaatcaacgttgtcaaaatacgagcgcggcgaaatatcaatagatattcttactattaaggaaatttctcgggttttaaatataagcattgatgagttattacctggaaccgctgataattcaagtcaacattgctatccttccactgcaaatgtcccatcattttttaaaaacaatacacgtttttattcttattattatgatggccggaataaaaatataatttgttccgctttattggttaaaaatgctcatgatgataactctatcggcgttcatatgtacatgaatataaaagatataaattaccctcaggcatgtgaaaatacatactatggtctgatgactcatcatgatataattactagaatcgacttcattaatcgtgatacatcagtagaaaaagcatcaatagctattctctctccatttgttgaaaatgatgaaagatgggggctttggtcaggaatttctacaaggccggtaatgccggcctcaataaagatgctctttacaaaaactccccaaaagacagacatagacctaaaaaagaaactaatgttaacacaagaagattacaaactaataaaactttataatatgtttaccgtattttaaacaatacaatcaaagaaacagcagtgaggaacagtctgtccccggccgtcataaactaaaagaaaaaggataacacatttatgacggtaaaaagtgtcaatacaagaaatctgacgaaagcggaactggataaagaagacgcgcgtattaaagagatgacggcggcagagcttcgtaatttcagggagagctttgacgcggaccagatgggttttgccggcaggaaggagggtgtctgatatggaaatcaaccgtcttctgacgccatataattacagcaacggtctggagagccgtatcaaatacattgtaatccattatgtaggagctacaggcggagcaaaagccaattgtgagtattatgcaagcaaatacatcggggccagcgcccactactttgtgggctttgagggagagatatggcagtcggtggaagagcgcaatatcgcctggcattgcggagccaatgcatataagcatcccgagtgccgcaattccaacagtatcggaattgagctgtgtgtcagaaacaaaggaagccaggcggcaaccagccgcgactggtactttgaggacgccacggtgcgttcggctgtggccctgaccagagagctgatggaaaaatacaagataacggcagaccgggtggtccgccattatgatgtcaccggtaaaatatgcccgaatccttttgtctataatcatacggatcatacctgggaggagtttaaagccgcgcttaaatcagccggtttcacaccgggctgggagaaagatactttgggcagataccgctatgtacaggcagacggcacctatgcagttaataaatggctgctgattaaccaccattggtatctgttcgggaaggacggatatatgctgactgactggcagcgctggaatggcagcagcgtcatcggcccgaatgatccgggagactggtatttcctcgacaatacggtggatgggccgttggagggggcatgctggcacacgctggacaacggagcacaggtgatctggtttgtggattagcagacgtaccgatttattatattgattcaattacggctgacaaaagcggaggcgctgcaaaaccggtttattccagttctgcagcgcctccgcttttgtcagccggctgctcctactgtataagataaacttccgccatctgcgaaccaaactggcgtgtctgggcatgggtgtcaaagaaaatatccacatgtctgccctttacgccgccgccgacatcctctgccgtgtaaacggttccgttaatcatcagtttgcttccgattgggataaccctgggatccacagccaccgtatgcccggccgcggcgattgctccggaactggtatggcgtccccatccctcggaacaggaacggcaggggcagtaggcggtcagacggaaggtgccgagaaggtgggccgtccttccgtctgtggctgcggccgcgttcccttttgtatagtagacggagttagtgaacttctgtccgtctttgtaagctgccgccgaatacgttccgtcggctaaattgctcagatcaacggtcgcggtaaaagccggggttccttcttctcccacctgtgaaaccaggtcatttcttttggaatccggtttggcaggtatttcacttaccgtttcgccggtcacggtgttcgtgattttcaaaagaatatcgggagaggagagcggggaagccgtctcataggcccagccggaaatctgcgttccgttgaaaacgtcaacgctcccgacgatggcgcctgctgaggcaaaagccggtgttgtatagaggaatgtgagacttatcatcagtaagagatactttagaataaacgtttttttcataatagataaacgctcctttctgttaccttacttacaataattacatatcgtaacataatttaacaaatatgtaataattaggtaacagtattgtattatacatgatttccagattttgtcaagttcaaaaaaaacagacgctatgacaagattatcatttgtcatagcgtctgtttctttgaaaggaccggcgtcaaaaaatctgagagccgtgtctgtctttactccaccgcgtatacatcaactgttttcagaccgtaattaagcgcctgctgatgtgtgtcgaaaaagatgtccaacttattgtcgactacattcgttccgatgtcctctaccgtataaatggtgtcgcctatcattaattgagtgccgatagggaagcggtttatatccgccgaaatggtgtggttagctgtagggacggttcctgaataggtcagcttatggccgcccggacaacactgggaacagttacaatatgcagttgtctggaatttaccgagataagctcccttctttccagtttccggtgaggccggtaccggagcgcttttgtctccggcaggtccctgtgacgctgccttcacgccggccgtctccttcttactgtattggggagagccgtaaatccggttctttccggcagccgtctcaacatatccctccacgataaaggatgtgccttcaaggctgtcccaattcacagtgtaagaaaaggcgtgattgccgtttcccatgctatttgctaaatcactacggtattggtctgctgtcactctggcaagttcctttgcctcggtagttccgtctgtgtaaacatagaggactacggaagcacttttgtcaggattgtccgtatcaactgcccatccgcttatgacggaaccggtaatcgggtccatctcgccgtttgaattgtcggcgaaggatgtaaacacacccatcagcatacaaatgatggtcagagctgctacggcaaatccatggcgtaatcttgttctcatgattttcctcgcaatccggttttattttgttttggcaatggaaagcccgtttgacgcgcaatccatcatgtttcataaatattatgatgtattatcattatattacaaaattattaaaagtcaagataaacagcggaagcgccctgtatgggcagtgcaaaaaacgcttataaaacgttgcttttgaccaatttcggagaacaagctatagatgaaaacaggtccgatggatacttgatattgtggaaaaaactggaaaaccaattcagattttattaagaaaaatatttttctaaaaatttctaaaaaattagaaaaacgggttgacaaaaggaaggtgaagtaatatagtatcaatgtagatgttagcactctcaaaggttgagtgctaataaattaaaaacttccttccgggaagatggatactgagaaaggatgaatgcagatggaactggatgagaggaaagaaaagatattaaaagcgataatccagacctatctggaaacgggggagccggtcggctccaggacgatttccaagtattccgacctgcagcttagctcagcgaccatacgcaatgagatgtccgacctggaggagctggggtatattatacagccccatacctcggcgggacggattccttccgataagggataccgattctatgtggatcagttgatgaaggaaaaagagaatgaagtcactgagatgcaggaactggtgattcaacgggtggacagggtggaactgctgttaaagcagcttgccaagcttttggccgtcaacacgaattatgcaacaatgataagcggtccccagtatcatcacacgaaactgaaatttatccagctttccagggtagaggcagggaaacttttaatagtgacggttctggagggcaatattatcaagaactcaattgtccgcctggacgcagagctgaatgatgatgagatcctgaatttgaacatacttttaaacaacagcctgaacggcctgacaattgagcagatcaatctggatgtaatcagcaatatgaaggaacaggccggcgacagacgccaggttgtggacctggtgctgaatgaagtggcagaggcaatcagggccaatgaagaggacctgcagatatatacggaaggaactacgaatattttcaagtatccggaactgagcgacggccagaaggccagccagctaataagtactctggaacagaaggagcttcttaaaaatctctttacggaatccggggagggaagcgaaaagcatgaaatacaggtgtatatcggcaatgagaccccggttcagtccatgcaggactgcagcgtcgtaacggccaattacgtattgggagacggtctgcgcggaaccattggaattataggtcctaagcgtatggactacgaaaaagtggtatctacccttcgatcgctgatgagccagctggaagatacttttaaaaatgaagaaaggtgagttgcaaagtgagcgaagagatgaaagatatagagatgaatgatatagaattgaatgaatccgcagctgcggaagaaacaaacggcatggcagccgatgaagcggcaaaaaccgaagagacatcggcgcagggaaacaatgaggcgtcagaagaggcggacggtgaagcttccgagacgggcgcaaaagaaaagaataccgagaaaaaggggttcttttccaaaaagaaagataagaaggatgagcagattgaagaactgacagaccgtctgaagcgcacgatggcggaatttgacaatttccgtaagagaacggagaaggaaaaagcggccatgtatgaaatcggggcaaaggatatcgtggaacggatccttccggttgtggataactttgagagagggcttgcagccattcctgaagcagaggtgaaatcggcttttgcagaaggcatggatatgatatataagcaattattaaaaacgttagaagaggcaggggtaaagccaatcgaggcagtaggccagccgttcgacccgaatttccacaatgcggtgatgcatgtggatgatgaaacacttggggagaatgtgattgccgaagaattccagaagggatatctctaccgtgacagcgtagtaaggcacagcatggtaaaagtggcgaactaggcagcagaaaagacagttttaagataacagagacaacaacacaaatttagaaatttggtaaacaattaattcaggaggaaaaaactatgagcaagattatcggtattgacttaggtacaacaaatagctgtgtggcagttatggaaggcggtaaaccagtagttatcgccaatacagaaggcgtaagaacaacaccgtccgtagtggcatttacaaaaacaggagagaggctggtaggtgagcctgctaaacgtcaggcagttaccaacgcggagaagaccatctcctctatcaagagacatgtaggtacagactataaggtttcaatcgacgacaagaaatatactccacaggaaatttccgctatgattcttcagaaactgaaagcagacgccgaaagctatctgggagaaaaagtaacggaggccgttatcacggttccggcctactttaacgatgctcagcgtcaggctacgaaagatgccggaagaattgcaggactggatgtaaaacgtatcatcaacgagccgacggcggcagcgctggcctacggtcttgacaatgaaaaagagcagaagattatggtatatgatctgggcggcggtacgttcgatgtatccatcatcgagatcggcgacggtgtaattgaagttctcgctaccaacggcgatacacgtctgggcggtgacgactttgataacagagtgacacagtggctgattgatgaattcaagaaagcagaaggcgtagatctttccgctgacaagatggcccttcagagactgaaagaagcggctgagaaggcgaaaaaagagctttcttccgcaaccacaaccaatatcaaccttccgttcatcaccgctacgagcgaaggtccgaagcatctggacatgaacctgacaagagcaaaatttgatgaactgacaagagacttaatcgagagaacagcaatcccggtacagaacgcattaaaggatgccggaatcacagcgtccgagcttggtaaagtccttctggtgggcggttccacacgtatgctgtccgcacaggagaaagtaaaacagctgacaggccatgagccgagcaagtccttaaacccggatgagtgtgttgccatcggtgcggctatccagggcggtaagctggcaggcgatgcaggtgcaggagatatccttcttctggatgtaactccgctttccctctctattgagaccatgggcggcgtagctacaagactgattgaaagaaatacgacaattcctacaaagaagagccagattttctccactgcggccgataaccagacagcggttgacattcatgtagtacagggtgagagacagtttgcaaaagacaacaagacattgggcaatttccgtctggatggcatccttcctgcaagaagaggcgttcctcagatcgaagttacctttgatatcgatgccaacggtattgtaaacgtgtctgccaaggatctgggaacaggaaaagagcagcacatcacaatcacatccggttccaacatgtccgattccgatattgataaagcggtaaaagaagcggcggaatacgaagcacaggataagaagagaaaagaagcgattgacacgagaaatgatgcagattccatcgtattccagactgagaaggcactggaggaagtcggcgacaagatcgatgcaaacgataaggccgttgtcgaggcagacttaaatgccctgaaagaggcaatcaacaaagctccgattgatcagatgacggatgcccaggttgatgagattaaagccggtaaggaaaaactgatggcaagcgcgcaggctctgttcgcaaaggtttacgaagcggcacagggagcggcaggcgcacagggaggtcctcagccgggcccggatatgggcgcaggcgcacctcatgatgacaatgtagttgacggagacttcaaagaagtgtaatatagcttctgacagtgattaagataaaaaacacgtagcggggattgggcaaagcccaagcccctttacgggtgtttaggagaggaagacttgacatggcagagagtaagagagattactatgaagtcttaggcgtttccagggatgctgacgacgcagcccttaaaaaagcatacagagcacttgctaaaaaatatcatcctgacgcaaatccaggcgatcaggctgcggcagataagttcaaggaagcttcggaagcctacagcgtattaagcgatccggaaaagagaagacagtatgatcagtttggtcatgcggcctttgacggtgcggcaggcggcgccggaggattcggcggctttgatttcagcggcgcggatatgggcgatattttcggcgacattttcggtgatttgttcggcggaggaagaagcagcagaagcgcaagcaatgggccgatgcggggcgccaacgtgcgtaccagcgtgcgtatcacatttgaagaggcgattttcggctgcgagaaggaacttgatctgaacctgaaggaagtctgtgataaatgtcacggaaccggtgcaaaaccgggaacccagccacaaacctgtacaaaatgtaacggcaaaggaaaaattatgtatacgcagcagtccttcttcggccagatccagaatgttcagacctgtccggactgcggcggtaccggcaagattatcaaagaaaaatgtccggactgctatggaaccggttttgtcaccaggagaaagaaaatcaaggttacaattccggccggtatcgataatggccagagcctgcgcgacaggggcaacggtgagccgggtatcaatggaggcgaaaggggcgatctgcttgtagaagtaatcgtatcccgcatccgatattcaaacgccaggatacgagcatctattccaccgtaccgatctccttcgccaaagcggcgctgggcggcccgatccgtatcaagacagtggatggggaagtggagtatgaggtaaaagcaggtacgcagaccgacacgaaagtgcgtctcaaaggaaaaggcgttccgtcgctgaggaaccggaatatcaggggcgatcatttcgtgactctggttgtacaggttccggagcgtttgaacgaggctcagaaggaggcgttaaggcgctttgatgatgctatgaacggtgtggctccggatggggagaagcctaagaaaaaaggattgtttaaataaacgggtgaggacgctgccggtacggccggcggacgggatggtggggtgtgtatatgagtctttcgtcccggggaagattgtcgtggtatgggactgcgggcgaagataaagtctgcggagcccgctcccgcgctgtgaaatgcatcgcgctgttatgctcgagaggaccttgcaaatcagcgatggattcaggcggcatccgcagacttaatcttcccctccgccccaaggccatgttatcgccgggacgaaagacttaaggccaagggtatcgcccgtccgccggcctgcggccgctgaatgtctcacgcgttaagtgcgggggcggaccttgccgaggccactcaacgcatccatatgtgtttgatatatgcaggctatgggataaagtatttgttagagtatgtttgttagaagtttaatacatttgatgtggttgaaggcggtgacctgtgcgcggagcgtgcaggttattttaattggagatttaactgaggttggaggacgcgtccggaacggaccatgtccggtgtggtgggggagtctgtctgagtcttccgtcccgtgggtaggttgtcgtgaagggggaatccggccggaatgaattgctgcggggaccgtttgcactctttggagtgcgcaacagtgctaagctcgtgagggacctcgccaagcaccggcggactcccatgtcccctccgcaattgattccgcctacttccccggttcaggttatcgcagggacggaagactcaggcggaagttttctgacaccggatatggtccgttccggacgctgattgtctctaaccttaaatggggaggaccctgtcgcggccactacgtgtttccggcaaactgatataaacattccgcaattccttaataaaggcgcattgaaggcatatcgtatttcccgcacacggaagcactgagtggcctcgacaaggtccgccctccgcacttaacgcgtgagacattcagcggccgcaggccagtggagggggccgatacacttggcggagtctttcgtcccggcgaaaacctggccttggggcggaggggaagataaagtctgcggatgccgttgaaatccatcgctgattagcgaggtcctgtcgagcttagcagcgcgatgcatttcacagagcgggagtgtgctccgcagactttatcttcgcccgcagccccataccacgacaatctcccccgggacgaaagactcatacacaccccccaccaccccgtccgctggcctgcggcggcgtcctcacctgcttaataaaaaggtaaactttcgtaagttgacttaccccgaaatgttctatacaattagacaatggctgacaccgtcaaaaatttcagaaatggtaaagaagcagagagggagaaaaggtcagatggcagatattaagaagaccgcggatggcgtggacaatgacagcccatacagggctttggaggctgacgcggcacagatgaaaatagaagaagcccagggagagctggagccgggggaggctatgacggagtgtgaaatggaagtcgaagccgatatgctgctccaggcagctctggaagagaaactgaaggctgaggcaaggctggaggcagccctggaagagaaacgggcggctgaggcaaagctccaggcggctctggatgagaagcgggaggctgaagcaagattggaaggcgccgctgttatcaggccggaggctgctgcttcggagccggagcatggcgcgccggagcttgccgcttcggaaccggagtttgccggcacatacagggaatccgctgaattggaacaggaagccgcaggttcggatgaagctgacgagccggagcgcaagatggccggtcaggaacgggagcttcacgaaactgagccggagattgataagctggagccggtttgggaaaacagtgctgcaaacggcagtgacagcggcgagacataccgggaggagcgcgccggaagaggccggagccgcgccagaagaagcagaaagaaaaatgcggggcagggaatagagatgccggagggagtccatgattcccaaaacaatcatgaaaagacggcgttccctgcaggacagacggaagctgcggcagctctgcaggaaggcaggggcaataagaaccaaaaaggcaaaaaggcggctattattgcagcctgcgttctggcagccgttattgtggccggtggaggagcttacgcagccatggcacagaaatacaagaaggtatttttcccgaatacaatcatcaacggtatgaacgcttcggggcgtacggtggctgaagtcaaagagatgattgcaggcggtatcgagaattacgtcctgacaatcgaagagcgggagggaggacaggagcagctcacaggtgaggatattaagcttaaggccaaattcgacggcacgctggagcagattgtcacaacccagaatccgtatgcatggctgagctaccagcttaatccggccgaatatacaatcggcacaatgattgaatacgatgaggaagcttttacagatgcagtgaaggggcttaaatgcatggatacggctctgatgaaggagccggtaaatgccggcatttccgattatgttccgggccagggctaccatattgtacctgaaactgcgggaacatatgtaagtgaagacgtcttaagaagcagcattacagatgccgtcatgaatttgaaagatacactgtcgctggaagaagcaggagcgtataagcagccggagattacacaggatgatgcagccctgaaggagcgtctcgacaccatgaaccggtatgtctccacaacggttacatataaattcggagataagtcggaggttttaaatggcgacaggacacatgagtggctggtaacggatgaatccggcggcgtatcaatcgatacggcgcgggcggccggatatgtggaggagcttgccgctgcctacaatacttccaacaaggcaaagaattttaaaacctcctatgggcagacaatccaggtaaagggaggcacttacggctggaagataaatcagaaggaggagacggctgagctgatcgccatactcaagtccggccagagccaggagagggaaccggtatattcccagaaggcggcaagccatggggagaacgattacggagatacctacgtggagatcaatttgacggcccagcatctgttcttctataaaaacggaagcctggtggtggaatcagattttgtgtcaggcaacctctcaaagggctggggaactcctgccggaacatatccgcttacctataagcagagaaatgccgtattgaaaggagaaggttacagaactccggttgactactggatgccgtttaacggcggaattggtatgcacgatgcaacgtggagaagttcctttggcggaacgatttataaaacgggcggttctcacggctgcatcaatctgccccacagtgtggcaaagaaaatttatgaaaatattcaggccggaatgcctgtaatctgttacaacctggctggaacggagaagggaacctctgcaacgccaccgccggctcaggtcccggccgaggtgccgacacaggctccggccgaggtgccgacgcaggccccggccgaggtgccgacgcaggctccggccgagattccgacgcaggccccggccgtgcctgagacacaggctccggctccgcctgagacgacagccccggcaggccccggttctgatacggggcatggtggaggcgcctctggcccaggctccgaaatcagatagaatacggatttaacggctgcggtttccgctgaaagagagggctgtgaaccgcagtcacttcacacaatataattactataggataaagaaggtcagaagatatggaaaataaaaaatacagagtggctgcggcgctgataactgccgcagtgctgacagccgtttcaggctgcagtagaccgggaacttcaggaggggcgcagacggaggccgaaagcactgcagcaggaaacagccttcctgaagcagaaaagcatcaggaagcggacgaagtgccggaagagaagaggaaacttctggaaaccatgacggcagcgattgaaagccagtttcctcaggagacttttaccgatataccgatagatgagacagaggaggccgtttccaaattcaaggaaagctacgcattatctggcagaagatcatcatcgggcaaagaatatatagccggcgtgagcctcagggatgaaaacccgctggagggaatgagctgccggagtgacgggaaaccttcggagtatgtcaccagccagtttgcagacggccgttttattctgatggagaaagcaggcggggaaggcggcggtttttctgagctgtatgacatactacagacgggagagagcggactttcatatatgctggatgtggcacagcgccaaaataccctcgttatgccggaagaaacaccgtttgtacgtgtatatatggtaaaagggacggttcccgccgcggaatatattccattgacacaggaggaatataccgtcataaaggaaggaaaacctgcagaaatgcaggacggtactgcgggaacgctgctgctgtgcgaacggaaagaggatgtgcagaagctgtggactgattcggccccggccgttacggaagagacactccgtctggcgcaggaacgctgcggatacagcgcagacgcgctgagtcaggagcctgtagtcaaggcatctatgacgcttcgggcgcatggggagacgcgggaagaaacgctgggcaaccgggaggatattgaccgtctgcaggaaattctccagaaaatcacaccgcaaactgatttcctctccagcccggcggggagctatgacggaactattacgcttaccggacaggataatactgtgcagacactgcatatcggactgcagggaggagcctgtgttctggggacatcatggttcggcatgctgccggaagatgatgccgcagaagtcttaaagctgttcagcacgatagacggctggaaccggtacggcggtgaaatttcgatccggattgatgatgctgcccatactgaggaagatcagtcgattacctttactttggaaaatgggacgggaggtcctatcgattatattctttccccgattttctataaaaaagagggcgattcctgggttatgctggagagtattgccggattctgcggtgtcagcgaccgaatggaggaagaagagaaggaattgtcggttccgtggaagggagcatttgagacaagggagaaggactttataagctggaaattcaggtagccccggaggaaggactccgctttgcagtctctgatacatttgtcgtaaaaaaatagtttacattaaaaaaagattgtgctatactgagtcggtatgaaatacgccgatgcccggttttttgaggactcctgacataagcctggcacctggtgagaatattaatttaaaggaggaaatcgcaatgatttcaaaggaaaagaaagctgccattatcgcagaatacggaagaaaacctggagacacaggttcaccggaagttcagatcgctattttaacagcaagaattactgagctgacagagcatttaaaagaaaacaagaaggatcaccactccagacgcggacttttaaagatggttggtcagagacgtggacttcttgactacttaaagaagacagatctggaaggataccgtactttaattgaaaagttaggcatcagaaagtaataacaagatttagggtggagcaatccaccctagttgtttatggtggcggaacgtatgaggacatacgtttctctgcttatgtagaagatctaatccgagaccgctgatgtgcatataaggggaatgccttgtgttcagatcagtagtttcggtatcttctgcagcacaatggaaatgatttatttttgaaaggagatacgaaatgtataagagtttttcaatggaattaggaggcaggacactgactgtcgatatcggcagagtggctgcacaggcaaatggtgcggcgtttatgcattatggagacaccacggttttatctacggcgacagcatccgacaagccgagggacggaattgatttcttcccgctgagcgttgagtttgaggagaaattatatgccgtaggcaaaatcccgggaggttttaacaaacgtgaaggcaaggcatccgagaatgcagttctgacatgccgtgtaattgaccgcccgatgcgccctcttttccctaaggattatagaaatgacgtgacgctgaacaacctggttctctccgtagatccggactgcagccctgaatatacggccatgctcggcgcagcgattgcgacctgcatctcagacatccctttgacggtccctgtgcgacaacacagatcggactgattgacggagagtttattgtaaaccctaccaacctgcagaagaagctttctgatttggctctcaccgtggcttccacaagagagaaggtaatcatgatagaagcaggagccaatgaggttccggaagatatcgtgcttcaggcgatctttaaggcccatgacattaaccaggaaattattaaatttatcgatacaattgtagctgagtgcggcaagccaaagcacacatacgagagctgtgccgttccggaagagctttttgcagcaatcaaagagattgttcctccggcagagatggaagaggccgtattcacggacgagaagcagaaacgtgaagagaatatcaaggctatcacagcccgtcttgaagaggcgtttgcagacaatgaggaatggcttgcagtactgggggaagcagtataccagtatcagaagaagacagtccgcaagatgattctgaaggatcataagcgtcccgacggccgcggcgttacagagatccgccgtctggcagcagagatcgatatgcttccgagagttcacggttccggtatgttcacacgaggacagacccagattttaaatatctgtacactggctcctctctccgaagcacagaagctcgacggacttgatgaaaatgaaaaatccaagagatatatgcaccactataacttcccgtcctactccgtaggtgagacaagaccgtccagaggaccgggacgccgtgaaatcggccatggcgccctggcagagagagcattaattccggtacttccaagtgaagaggagttcccatatgcaatccgtaccgtgtctgagaccatggaatccaacggttccacatcacaggccagtatctgtgcctccactctgtccctgatggcggcaggtgttccgattaaggcaccggtagcaggtatttcctgcggccttgtaactggtgatacggatgacgactatattgttttaaccgatatccagggccttgaagacttcttcggcgacatggatttcaaggtgggcggaacccataagggtatcaccgcaattcagatggacatcaagatccacggccttacaagaccgattatcgaggaggcaattgccaagacgagagaagcaagaattcacatccttgacgatgtaatgaaaccagttattgcagagccgagaaaagaacttagcaaatatgcgccgaagatcgagcagattacgattgatccgcagaagattggcgatgttgtcggcaagcagggcaaggtgatcaataagattattgagcagaccggtgtgaagattgacattgatgatacgggaacagttgccgtatgcggtaccgataaagagatgattgacaaagcgcttcatattatcaagagcattgtcacagacatcgagccgggtcaggttatgacaggaaccgtcgtacgaattatgaatttcggtgctttcgtagagctggctccgaataaagacggtatggttcacatttccaagctgtccgataagagagtcggaaaagtggaagacgttgtaaacattggagacgaggtcactgtaagggtgattgaggttgacaagatgggaagaatcaacctgagcatgaagccgggtgatctgaacccaaaggctgagaaaaaagaagatagagcggaataatccgctgaaataggggctgctgcagaacggatatacggaaggttttgcagcagcccctgctttcgcaacacgcttgtcatcgttccttgcaaaaacagaacagactgctgctgttagcagaccgcgttgttcagcgggctgtcgatagtaacaacagacttgatatgggagaataatttatgctggaagtaaagggaatttcgaaacattataaaaataagcagatactgaatggcatttcttttgccgcggggccgggacagtgtgtcgggatcgcgggcggcaacggctgcggtaaaacgacgcttctttctattctggccggtgtaaacaggccggacaggggaagcatctgctttgatggagtggaggcagtgggaaacagaaaggtatttgagagaaatgccgcctatgtgcctcaggaaaatcctctgataccggagctgacggcccgtgataattacaggctgtggtttaagggagataaagcggagctggaacgggatctggaagaaggtgttggaaaattcctggggcttacggaatttctcgggacaccggcaggaaaattgtcgggcgggcagaaaaaaagactcagcatcgcatcggccctttcgaaccaggcttcccttctgattatggatgaaccgggagccgctcttgatctggaagccaaagaagagattcttacgtatatcagaaattatctgaagaatgggggaacggtgattcttacttcccacgagacgcaggaactgtccatctgcacgcagctttttgttatgaaaaagggtctgctcatgccggtgacggagaaactgtcggctgcggagctggttttacttttttaaatcttaagattatagacaaaatcttacaatatctgtattaatgatggttctttcacaaagatatgttatactaaatgcgttaattatttgcataaatttgataatggaggaaaaaggatatgaaatgcccgcattgcaatcaagaaatcaatgatgaaagccaaatttgtacatattgtggaaaatcattgaacgaagtaccggacggccagtctcagacggagaatcaggagcattcttccgatacagaggcagacagccaggcaacagcagagccggcggctgaagagaatatagtggcgccggaagcaggagctgaggttacggaagcagtagctgcaaaagaaactacggagccggcaggcgaaccggcagaaccggcaggcgaagcgccgaaaggaaagaagaaatgggtaatacccgcagcgattgcagcagtcgttgccatcgcggccggagcatttgccatgacaagcgcaaaggatccgaaggatgccgtaattggagcatttaagagcattgtagctgagggacagacaaacccggcggaagaaattttcggagtcagcgccatgacggataagctgaataaagagtccagcgagatgaatatggaactgacggtggaaggttcctccgacgaaatactcagccagcttgtatcaggcaagataggcatgtccgccttaaatgacattgacaacaaaaagatgagctttgtgatgggtgtcggctatgcagatatgaaccttgccaactttgaattctatctggatgaaaaagaactggtcatggcgattccggaactgtcatcaaaggcgttctcaatgaattatgccgatgatctggaaggtcaggttaagaattcaccgtatctgggacagattctccaggacagcggaatggatctcacaggcctgaacagctaccttgaaaagtgcaacgaactggcggcaggcggagagcagtttttcgacctggaagaactgtggaaacgttataaagaaggcagcaaggctattgacgatctgaaagcggccatgaccgtggagaaagcggaaaagaagagctttactattgacggcaaagaagtaagctgcgacggataccatacgactatcacaaaagatgccctgattcagtttgcgacaacaaccaaagaattcttcctgagtgacgagacgctgaaaaaagattttatcgaatatatggatttgatgaacgaacttcagggaaccatggtaatgatggcaaatccatatgcccagaccggagaagagatgcagcaggagctgtggaaagaagctgaaacgcagcttgatgcggtaattgaagaattaaaagattccatgggtgatctgacgatggacgtatacgtaaggaaggacggcaaaatggccggcttcgattacgagacaactgctgtgatcgcagaagaaaatatcaagctctacggtaatgtcgcatttgccggaggctacagcatgatgtccaacgtgaaagcagttttaaatgttgagtctgctgacggcgaagtagtgacggcttctgtcgataaaactggtacctacgagaaagacaaaacatgggccgggactctgagaggaacaatcggaaacggaacggattcttacagcttcgtttataccggtgattataacgcagagagcaaggattacaatctttccctcgatctcttaagcggggaagagagccagtttaccatcagctcaagcggtatgtttaccgatcttgtaaaaggagaatcctttaaccttgagatgacctcccttaagatggaaacacctctgattaccggagagaacgagtaccttgagctgtccggcaaatatcttgccggtccgctgaatcagacagtggaagcgccggaaggtgacagattagatcttcttgccgctacggaagaagattataataatgtatatactgaaattatgggtaatgcattcagtctgatgatgaaactctattaatgagataaagggatctgtatgcgtacattcttgacatattttaaacttgaactaaaaaggacgttaaaaagtatcccatattttcttgcaggagcaattgtgctggtgttactggctggcacaattgctttttctgcaagtaagatgctttatggagacaaagcgcttgggaaaattattgtaggtgtggtagtgcctgagaatgacaggctgtcggagatggctatgaatatggtggcttctctggacagcgtggggagtctgtgcgaatttacctatacggataaggaggaggggacgaaactgctggagcgcggagagatatttgctctgatggagcttccgccgggtcttctggagggaatcatcgacggcagcaatatccccgtcacaatcacatttcctgaaaattcaggactggaagccgcagtgtttaaggaactgacacaagccggaacctcgattctcgggacagcccaggcagccatctacagcaccgacgattatctgataggacatcagatgcaaagctcaatcaggcaggcagagaaagatttgaatacggtattcatgcgttatgccctgtcacgagaagcttatttcagaacagagaaggtcagtgcgtcaggcgacgtgacgacagccgtattctatgggatatcggctgtcgtcatgattctgctgcttcttggaatccctgcggcccctatcgtgcgcccctataaaattgtggtggagcaaaagcttgccctctgcggaatcggaagagtaaaaagaacagccgtgaggacggctgcgctcaccacgctgctgcttctggcttccgctgttccgcttgcctgttttatcagtaaaggttattttgacagtgcgtttactgcggtggcaggctggctgcttgtatgcatggcggctgctggctggattttgtttatctacgagctttgcggcaatacgacggcggcaatcctgcttttatttgtttccacgatagtgatgctttttatatcgggcggaatcataccggctgtatttctgccggaggcagttaccgggcttggaaaatggatgccggcagcttttctgatggatgcggtaaaatggatgataaaaggcggaactgcactgcctgtgttgaaacttgtcttaatggaaggaattgtgtttgctttatcggcagttttgagaaggaaggaatatgattatggataaaattgctttatggttcttcctctcctgcaaaaggcagcttaaaaaaccgttttttttgattcttcttctgattctcccggcgggtgtctggatgttccacaaggcggaagaagaaagttcaggaaaaatttccattgcactttatatggacggcgatgaatggaatgagaaggtagcggagacactgtcagaaggagaacattcatttgaattctatcagtgtgaaacgcttcaggagcttcaggatgacgttgcaggagaaaaggcggaatgcgggtattattttcctgccggtttcagggaactgcttaaggagggcggataccggcgctcggtaaaactgtatgtctctccttcaactgtagcggacaagctttcctccgaagttgtgtttgccggtttctttcaggtattcggcagagagcttcttgaggaatacacccggaccgggcagccttttgaggaggccagggcaggtggacggaccggcatggagccggaacaaatctgggaagagctggagcctctttatgatcagtatctggaaaacggaagtacttttgcctttgaatacaggactatgggggcgggagtactgaaaaaggattcggtgacggccgtattcccggtcagaggcatctgcgccgtattcatctttgtcatgggacttgccgccgccgtaacggccggtgaggatgaatcgagaggactttattgtgcagtaacggcgggcagaaagagaagctatctgcttgcacagcttgcggcgcctgttcttttgtcctgcgtttccgcttttatctgccttaccatttccggtaacctccgggggattgggagggagtgggcggcgctgcttgtatacggcctgatgacgctgcttttttcttatattctgcttatgacggtaagaagtcctctggtgatttcggggctgattcccttctttatactgggaagcctgatcatctgccccgtgtttgccgatttatcggtttttgtaccggttctcggggtattgcggcggtttttcctgccttattattacctgattatgtagagatggaattgagaatggaggacgcgtccggaacggaccgggtccggtgtggtgagattggtttttctgagtcttccgtccccggttcaggttttcgccggggacggaagactcaaggcgaagattttcgcgccggccccggcctgttccggacgctgatgtctccagtttcaatggcggaggggaccttgtcgctgccccagctcacaacaatcctcccccggaataaaagactcataaaaccaccccgccaccccgtccgctggctgtcccggcggcgtcctcacctgcttaattaaatccccatcatacaaagattttacaggaaaaaatgttgctatttttcagttaaatctatataatgagaaaggacattggttagtgtaaaaatttcgttataaaatggaaaggagtgaacacaatggaaggccgaagtcacaagacggaatcagatggcagccaccctgaaccgaaggcagagcgtacttcgattttttgttgtgtgcactgccgttcttaagcagcggtgaagggcgcgcccaggcgtgcgtttcgtcgcaaggttgttttttctgtttccaaaatatataaaaagaaattttggaaggggaagatcatgttggatgaagagatcaaaattgaagataagatagaagaattgctgaggatgactgccgataagaggtacagggagctgaagctccagctggtggagatgaatgaggtggatatcgcttccttcattgaggagctggactcggagaagacggtggttgtcttcaggatgatgcccaaggaactggcgacagaagttttcgcctgtctgcccgttgaaaagcagcagcatattattacaagtattacagactatgagcttcgcagcatcattgacgatctgtatgtggatgatgcggtggatatgctggaggaacttccggccagcattgtgaagcgtgtgcttcagaattcaagtcccgacaccagaaagctgattaaccagtttttgaactatccggagaacagcgccggaagcgttatgacggcagaatatgtcgggcttaaaaagcagatgactgtggaagaagcatttgcctatataaggaaatacggtgtggataaggaaacgatctatacctgctatgtaatggatgaaaagagaaggctggaaggtgttgtcacggtaaaggacctgctgatgaatccctatgatacggtgctgggagacattatggatgtccatgtgattaaggcctacacgacggaggatagggaggaagttgtagatacattcaacgagtacagcctgctcagccttccggtggtggataaggaaaaccgtctggtgggaattatcacggttgacgacgtgatggatgtcatggaacaggaggctaccgaggatttcgagaagatggccgccatgctcccgagtgagaagccgtatcttaaaacgagcgtatttcaattggcgaagaaccgtcttccctggctgatgatcctgatggtcagcagcatggtaaccggaggaatcctcctgaaatacgaaaatgcgtttgcagccattccgctgctggttacgtttgttcccatgctgatggatacgggcggaaattccggcagccaggccagcacgatgattatccgcggtatggcggtcggtgaagtcgaaccgtccgatattatgaaggtggtatggaaggaactgcgggtgggggtgctctgcggcgtgggcctggcccttgtcaatttcattcgtctgatgctccagtatcccggccagcttatgatctgcctgacggttgtcatgagtatattctttacggtaattattgcaaaaacgataggctgtactctgccgattttggcgaaagtcatccatctggatccggctatcatggcggctccgatgattaccacaatcgtggatgcatgcagcctgatgatttatttccagctggcctgccggttgctggggttgttaggttagcgggagatttaattgagcaggtgaggacgccgccggtacggccggcggacggggtggatttataagtctttcgtcccggggaggattggcgtgagttgggactgcaaagaagatatagtctgcggagcatgttttcactcggtggaatgcatcgcgctactaagcccgacaggacctcgcaaatcagcgatggattccaaaggcgtccgcagactatagtagttgtttgagtctatttgttggaaatttgatacattggatgtttaaacagattgagcggaattaaagccggaatattattaccggatttaattccgctcaatttgctgtaattgatggcggtgccctatacgccaagccacccgttttagggatgacaccccctgaggctggagacaatcagcgtccggagcggaccgggtccggtgccgcgaaaaccttcgcctacttccccctccacgaccaacctcccacagggacggaagactcagccagtcccctcaccacaccggccccggtccgctccggacgcgtcctccattctcaactaaataaatcataaagccccattgaatactaacttgtttttttccagtcttcgttatataatggattttatcaatgattaggagtgtgaaactatgacgaaaatcagaacgagatacgcgcccagcccgaccggcaagatgcacgtaggaaatttgagaactgcattatatgcttatttaattgccaaacacgaggatggagattacattcttcgtattgaagatacagatcaggaacgttttgtcgaaggtgcaacggagattatctataatactctgattgataccggccttaagcatgatgaaggccctgatatcggcggcccggtgggaccgtacgtacagagcgaacgccagaaacaggggatctatatggaatatgccaaagtgctgttggacaagggtgaggcgtattattgtttctgcggacaggaaaggctgaacagcctgaagaggacggtgaacggcgaagagattatgacctatgataaacactgcctgaatctgaccaaagaagaggtggaagcaaacttaaaggcaggtatgccgtttgtcatccgccagaataatccgagcgagggaaaaactacgttccatgatgagatttacggtgacatttcagtagataattcagagctggacgatatggtgctgattaaatcagacggctacccgacttataacttcgcaaacgtggttgatgaccatttacagggaattacccatgttgtccgcggcaatgagtatctttcctcctccccgaaatataaccgtctttacgaggcattcggctgggaagtgccggtctatgtacactgtccgaccatcactaatgaggaacataagaagctgagcaaaagaagcggccattcctcctaccaggacctgattgaacagggatttatttccgaggcggtcgttaactttgtcgccctgctcggatggtcgcctgagaacaatcaggagatattctcactggacgagctggtaaaagagtttaattataaaaacatcagcaaatctccggccgtatttgatatggttaagttaaaatggatgaacggagaatatattaaggctatggacttcgaacgcttctacgagatggctgagccgtatatcaggaaggcagtcactaaggagctggatctgaagaagattgcttccatggtaaaaacgagaattgaagtgctgccggatatcgaaggccatattgatttctttgaggcgcttccggattatgatacggatatgtatatccataagaagatgaagacgacgaaggaatcctccctggaagtgttaaaggagcttcttccggttcttgaagcacaggatgactattcaaatgacgcactttacacggtcctttccggttatgtggccgaaaagggagttaagaccggatttgtgatgtggccgatccgtaccgctgtgtccggcaagcagatgacaccggccggggcgacggagattatggaagttctgggcaaggaggaatccctgaacagaatcagaaaaggaattgagattttgtcggaatcatagtgaagtgaagcagattttcaccgccgaacaatacggaggagtgctggggatttcagcactccttttgagatattttacaggaacaggataaccggatatggaatttggcaggacacaggaacaggcgatacgccacaatgaggggccgatgatgatactggccggccccggctcggggaagaccacggtaattacccagcgaatcaaatatctgacggaaagcttgaatatcaatccggcggacattctggttataacatttaccagggccgcagcagaggagatgaaggagcgctatatccgtcttacagggaacgcttccagagttaccttcggaacgtttcactcgatttttttccagattctgaagctggcataccgttacactgcgcagaacattgtcaggccggaacagcagatgcagcttataagggagctggcaggcaaagaagagcttgaactggaagatgagaatgaatttatttcttctattttgagtgaaatcagctccgtaaaaggggaaatgattgatttgcggcattattattccaggaactgtccggatgagacattcagaagaatctgcagcggatacgaagagcagatgcggcgtttgggcctcatcgactttgacgatatgatggttatgtgccggcagttgttcctggagcgccaggatattctggcggcatggcagagaagataccgttatatcctgattgatgaatttcaggatataaaccgtctgcagtatgagattatacggatgatagcagaaccggagaataatctgtttattgtcggggatgatgaccagtctatctaccggttcaggggcgctaagccggaaattatgctggggtttgaaagagattaccccggcgcggggagaatcctcctcgatgttaattaccgctgcacagaagagattgcaggtccggccatgcgtctgatcgagaataatgaaaaacgcttcagtaagaagatcaggacgaacggtgccagggggaagcagattataaccaggatctggcaggacagctttgaggagaacaacaggattgcggaggagataaaagcatatcaggctgcgggataccgctacggtgatatagcggttctctacaggacgaattccgggccgaggcttttgatggaaaagctgatggaatacaacctcccgttcaaagccagggattccgtccccaatctgtatgaacactggatatcccggaatatacttacctatatcagaattgcccttggaagccgggaacgggcggatttccttcagattatcaaccggccgaagcggtatatcagccgtgacagcttaagaaatccccaggtatccttcaatgaattaaaggagtggtatcacgataaagactgggtggcggaccggatagaaaatctggaatatgatttaaaggcagtcagccgcatgtcgcctctggcagcggtgaattacatacgccagggagtgggatacgacggtttcctggaggaatttgcagcgggacgcaggatgaagccggaagagctttttgagactgcggatcagctgaaagaaagcgccgccggatttaagacatttgaagaatggttcaggcatatagaggactatggggaggaactgaaacgccaggcccaggccggattgaaggaaaaaagccaggacgcagtcacactggcgacgatgcacggttcgaagggactggagtttaagattgtctatatactggatgccaatgagggagtgacgccccatggaaaagcggctctggatgaggatatggaagaagaaagacggctgttttatgtggcgatgacaagggccagggaacgccttcatgtgtacgctgtaaaagaacgttatcataagaaggcggagctttcaagatttgtggaagaatacctttgtaaggagtgaaatcatgggatatatacacatctactgcggtgacggaaaaggtaaaaccacggctgccgtcggcctggctgtcagaatggcgggcagcaatgggcaggctgtgatggtccggtttctgaaaaacgatgattccggtgaagtggattgtctgagacagattaaagggattacggtaataccctgtaaaaaaacgttcggttttacctggcagatgacagaggctgaaaaacgggaagcttcggcttattataaagagctttttgatgaggcggcagacctggctcttttaacggcggagcagggacagacgctctttgtcatggacgaggtatgtgcggccgtcaacagcggactgctgcaaaaggaacaggttcttgcttttctggaccgctgtcccgacagcctggagatagtgatgacagggcgggaaccggcgccggagtttatacagagagccggctatatatcagagctcataaaggtacgccatcccttcgacaaaggggtgccggcaagaaaagggattgaatattaatcgggaggacaaaggatgaagggcgtaagaggcaaaaccccggtcagaatggtgacggcccaggagagggaggctttgagacaggagattgaaggagagcatccgggatatttggatgagaacctgaaactgacgacaattgttaaaacatttacgggtataagagttctttacggactatattatctgcttatcacgctgatatacggtcttcagttcacacaggggatatttacgatattcagcgcatttgtattttatctgtggtactcctggatgctgaaggcagggaaaggcgttgccgtactgatgctggttctcagagggttcagtattgtaaccggaggcgtttcaattcttgggatgtcctactggctaccgtatcctctcgtttttacattgacaacggcgtgcgtaatggaattttgtgaggcgattttctgcatctacatactgtttaacaggaatgcatctacggtgatccgcctgaaccgggattgtgaagcgcgtttggcacatggtgtttccgcggggacactggaaaagatggcggagtataaaaatccctatacaggagataatgattccggcagcggggaaccgaatgccggggaagacaaagacgggaaaaacgattgacgcgtcgctgtccgcagacgaaattcagcggggatatttattttcaatgcctgtaaaaatccggcatgctgtggctgggaacgcagtgaatgaaaaatatccttgatttttctcacggcctctgataaagtggagttggaaagttagaaaaaagtaaatatgcaattataattgcctgccgtttggcagaagaaagaggttaagatggaagacaaaaagaatatgactccggaagaaatggacaatcaggaggagatgacggtaacactcaccctggatgatggaaaagagctggagtgtgttgtacttactatctttccggcaggagataaagaatatatcgccctccttccgatggaagatgcgaatgatgagtcggatgagggagaagtatatctttaccgctactcagaagatgagaacggccagccgaatctggaaaacattgaagacgacgatgagtatgagatcgttgccgatgccttcgatgaactgttagacgagcaggagtatgatgaagtagtcggagaagacgaattagacgattaaagtaaacggtaggggtcaccgccttcaatcaaagaaaagctctctctgcattgtgccgagggagcttttcgattaaggaatcccgagaggggggattcctttcggagtacatcttgcagacataattttacagacacgctccggggataaagcgggcggcagataagaggggtggttacagtggaactcagacaggaacagaaactaaaacagaccttatcacagaatatgcttcagtctacagaaattcttcagatgggacagctggagcttaaggaatatctggaggatctggcactggaaaatccggtggtggatatggacgagatgcgttccgaaaagtcatcggacgacaaaggggagagtaacgaagattttatcaggaggctggaagagctgcagagcatggacgctcaaaaccgccagtattatcaggacgagcaggatgaggccagccgtttcgaaccggcagagagaccggggatggatttaagggatgccctgatggaacaaatcctgtttatgaagatctcaaaggaagaattccgtattttagaatatatgatattaaatctggacgacaacggctatctgacggaggatctgccgcttctgtgcaaggagcttaagatttcggaagaagacggtgaacggatgcttaaggtactctggaaactggaaccaaagggaacaggggccaggaatctcagggagtgtctgctgatccagctggagggcggcagtgaggtggatgagctggcccgccggatcattgaagactatctggaggaacttggcaggaaccggatggagattattgccaggaagctgaagtgcagtatggatcaggtgctaacggcttccgatcggatacggatgctgaatccgaggccgggaagcggctttgggagcggtaaatatcagaaatatctggttccggacgtgctggtggtcaagacagaaggccgttttcagattataatcaatgatgagacatatccgcagctttccatcaatccgtattatctgaccctgatgaagggggaggattccggggaagcagccggatatattaaaaataaagtgaaacaggcggaatgggtatgccattgtgtggagcagagaaacaggacgctctatctgcttgtgcaggaaattctcaaggctcagattgctttctttgaaggcggcagagggaaactgacggcactgacccagagaagcgtggctgaaaagcttggaatgaatgagtctaccatcagccgcgccgtacgggaaaaatacctccagtgccaatggggcctgttcccgctgcaatttttcttttccaggggaagtatccagacctgtccggcggcagacgcaaaaaatacgccttccgaaaaggcaggcggcgccggtgcggaggcggtaaaggaacagattcggattctggttgcgggcgaagataagaaaaaaccgtacagtgacaggatactggcagaaaaactcggggaagccggattctcgatatcgagaagaaccgttgcaaaatacagggaagcgattggaattgccgatgcatcgggaagaaaggttttcgaacggaaaaacacgctgtgacatgctctgaaaaagggggagggccagcaggttagacctgctggccggagtatgaaaaagtctgtctaaggctcttgccttgttcacttattactatacagcagaaatgtggctaaaatatgtgcgtggaataaaacatttataaaaactattgataaaatctaaagaaaatgtggattaaatagttatagtttaccaatcagaggagaatatatgtcattacaattcattatcggcggctcaggctccggcaagacccgtcgtctgtacaacgatttgatagagcaggcggcagggaatccggacggccgctattttgctatcgtaccggaacagtttaccatgcagacgcagaaagatattgtaacgctgcatccctgtcatggcgttatgaatattgacattgtcagttttgaacgtctggcctacaggatatttgaggagctggcggtggagagcctggccgttctcgatgatatgggaaagtctatggtgctgcgcaaggtggcggcaggaaagaaaagggaactgaagctgttcggcagtcatctggacaagataggttttatcggggaactgaaatccatgctgtcggagttttttcagtacggcataacggcggaggttttggaagagcttgtctcggaggcggataaggaaaactggagcgcgatgcttaaacagaagctgaatgatatggtagtgctgcaccgcgcatttaaaaaatatacggaagataagaaatgcattgtgaaggaagaaattctggaaatgctctgccgcgttctcccggattcagagcttatcaggggcagtgtagtgacactggacggttataccggttttacgcccgtacagtaccgccttctggagctgctgcttcagtactgccggagagtagtggtaactattacaatggatccggaagaaaatccgtacagggaaagcggtccttcccatctcttccatatgagcaagcacacggtgtgcaggcttacggatttggccgcacagacgggggctggaagggaagaggatatccttcttttgcaatatccggcttaccggttcaaaaacagcccggagcttcagttcattgaaaaggaactgttccgtttccgcggccgtaaatacgaagaatcgtcaggtgcgccgggcgttgtgctgttccagtccgacacccctttaaaagaggtgcagatgatagccggcgagatagagcgcctcattaagcaggaaaaataccgttaccgtgatattgcggtggtgaccggagcgctggacgactattccagagaaatagtgcgccagtttgagacaaacagaataccggcttttatagattataaaaaaaatattatgggaaatccgatggtggagcttctgcgcgcagcccttgaggtcatgcagaagaatttctcttacgagagcatgttccgctatctgaaaaccgggctggtaacggataagcaggagatgttaagccgtctggaaaattacgctctggccctcggcatccgcagctttaaacggtgggatatggcctgggaggccgtctaccggggagccgagcttatcaatctggaggaactgaatgcattccgggaagagatactcacgcctctgagaccgttaaaagacgtgtttggcagccgtaaatctacggtacgtgaaaaaacggaggctctggtgcattttctggaggcgctgaatatcgaagaaaagctgcaggattatgaagcggaattccgggaaacaggggaggtgagccttgagaaggagtacagccaggtatacggccttgttatcacattattcgacaggataacggccctcctggggatgaggcagttgggaaaaaagaatattcagacattctggacgccggctttgaggagattaaagtgggtcttattccggctgttgtggatcgtgttgtggtgggagatatcacgagaaccaggctgtcccacatcaaggtgctgttttttgcgggagtcaatgacgggattgttccgtctgcgtcaggaagaggcggaatccttaccgaagcagagcgcaggagtctgaaaagccgtcaggtggagctggcgccgactgccagggaggaaggctttttacagagactctatctgtatttggttatgacaaaaccttccgaccgtctgtacctctcctatgcagcttcatcctcagacggaaagagcctgcggccttccgggctgattggccaggtgttaaaaatgtttccggaaaaacgtgtgatgagggccgatgaaaaacagatggctgcctggtctttacctcttggaaaacgccgggttatcgagggactgaaggattacggcagcagcaggcaagacagccggtttatggagctgttcggcttttttttacgttccgaattgtaccgggacgaactcaggcagcttgtggaggcgtcgttttatacatatgaggacaggggaatcggaagaaccgcggcaaaggagatatacagtgcaacccttcacggcagcgttacgaggatggaacagtacgcctcctgtgcctatgcccattttctggcttatggcctcgaactgtcggaacggccggtctatgagctggcggccgccgacatcggcaatctgttccatggctccatcgacctctattttaaacggatgaaggaggaaaaccgttccttccgggagatttctgaggaagacagaaaaaagctggtgtcggagtgcgtctctgatgtgacgaaggattacggcaatacgattatgtccagcagcgccaggaatcagtatctggagcgcaaggtccgccggattaccgaccggacggtgtgggcattgaccgaacagctcaaaaagggagattttgagccggccggctttgaggtgacattcagtccggcggataacttaaaagcgatgaaaattccagtttcaaaggaggaggctatccatctgaaagggcggattgaccggatcgatctctgtgaagacggagatctgctttacctgaagattatagattataaaaccggaaagacaaaatttgatttgatggaagcgtattacgggcttcagctccagcttgtggtttatatggatgcggctcttgaaaaagaacagaggaagcaccctgataaaaaagtagttccggccggtatattttactataatatagcggatccgatggtggagcggaagaaagagatggatgaggaggagacgaaacaggcgattttagaacagctcagaatgaatggactggttaacgcaaagccggaagccgtagtgcatcttgataaccgtcttgatttttcatcctcccggggagaggattcctcggtgattcccgtatcggtcaagaatgaggaaatcgcgaagaagtcctctgttgccggagagaaaaggtttgaagcgctgggagcctttgtcaaccggaagcttaagaatatggggcgtgagattctggacgggcgtattaccgtggcgccctttaaaaacgggaaccggacggcatgtgacttctgcccgtaccacagcgtctgcggttttgacttaaaaacagacgggtacggatacaggcggtttgataagctgaacccggaagatatctggcaggagattgacaaatacgcaccaaaagacggcgggacaaacggagatagccgaagcggagaaaggaggaagacggaagatgacagtgaactggacgaaggaacagaaagccgtaattgagagcagaaaccggaatctgctcgtttccgccgctgcgggaagcggtaagacagcggttctggttgaacgaatcatcagaatgataaccggcgatagcccaatcgatatcgatcggcttcttgtcatgacttttacgaaggcagctgcggcagagatgcgggagcgtatccaggcggcgatagaaaaaaaactggaagaagatcccgggaatgagcatctgcagcagcaggccgtcacggtacagtttgcccagattacgacgattgacagtttctgtcttcatattctgagggaacattttgactgcattgatattgaccctgcattccgggtcggcgatgaaggggagatgctcctgctgcgcgccgaagttttgcaggaactgatggaagactcctatgcaaatggaggggaggcatttgagcgctttgtcgatacgtattcgatcggcaaggcggacggcgggattgaagattatattatgcaggttttttcatttgcacagagtaatccctggcctgataaatggttcgagcattgcagaaaagagcttgaaacaacggattttggagaactggaccggacggagtggatgcggtttctgcttgaagacgtcagaacgcaggcaaaggagtgggaacggcagcttgaggatgcggtaaagctctgcatggaagaagacgggcctgcaccttatctgccgatggtaaatgaggatctgtgcaacgtaaggcagttgatttcggcctgcggttcatatctggaattcagttcggctgctgagcggttcacgttctcaagaatggcggcgatccggggaaagaattccacggtaaatccggataaaaaagaagcggtatctgaatgcagaaagcgcattaagaaatcagttgagaagatgcgggagcagtatctgttcgaatcaccggagaaaaccctggaggacatggaggcagggaaggagtccatcctgatgcttcttgcgctggcggaggagtttgcagcccggttccgggaaaagaagcgggaaaaaaatgtggtcgattttaacgatctggagcattttgccctggaggtcctgacagaggcaggaaccggaaggcccggtcctgtggccgacgaattgagccgccagttcgacgagatactcgttgacgaataccaggacagcaacctggtgcaggagaccctgattcactgtatttccagggagcggttcggcagtcccaatgtttttatggtgggggatgtgaagcagagcatttataagttccgtctggcccgcccggagctgtttctggaaaaatataacagctatacgtcggaagaaagcctctaccagaagatagaactgcaccagaatttcagaagccgcgataccgtgttaatgagcatcaatgatatctttttcaggattatgacaaagaagcttgggaatattgaatatacggatgagacggctcttcatccgggggcgtccttcgagccgtatgaaggacggaaacagggagaactggatacggagctgcttcttatcaacacggcgggcagtgagcttgagggctggacgatgatatttccgattatacagccagggagctggaggccggcatgatagccggaaaaatcagggagctgaccggcgaagaaaacggcatggcggtctgggacaaggatgagaaatgctaccggcctgccagatacggggatattgtcatccttttgcggagtgtcagcggctgggcggaaagctttacggagatactggcgcaccagggaataccggcctttgcggagtccagaaccggatactttgatacggttgaggtggaaaccgtcttaaatcttctggctgtcatcgataatccgattcaggacataccgcttgcatccgttctgaaagctcctttttgcggcctggcagaccgggagctggctcacattactgcagtctgcaaaagaaacattgagaaaggccgggacagaggactgtattcggcggtcatgaattttctttcggagagccgggcagattctgaacacgggccggaaggagaaaagtcggggactgatgagctgtttaatgatgccgcgattgcggaaaagcttgaaaagactgtaaaattgattgaggggctccggaagatggccgtctatctgccgatgcacagcctgctccaccggattttcgatctgacgggatactacgactatgtttctgcaatgccggccggggagacgaggagagccaatctggacatgcttgttgagaaggcttcttcctatgaggccacaagctaccggggcgtattccatttcatcaaatatatcgaaaagctgaaaaagtacaatacggatttcgggaagcgtcaacagttaacgaacagggcaatacggtgcggatcatgagcatccataagagtaaggggctggaattcccgatcgttattgttgcaggaatggggaaaatgttcaacaaacaggatacaagaggaaaaatccttatagactctgaattcggcattggaacggattatctggacagcaggaaacgcctgaagggtcccacgcttaaaaagaatgtaatgaagcgcaggatggagctggaggctctgggtgaggaacttcgtgttctctatgtggcaatgacaagagccaaggaaaagctgattatgacggcttcggataagaatctggacggaagaatcgaaaaatggagacagatttccctttacggaggtcaggttccctatacgatactcacaatggcggggtcctgcctggactggcttcttatgagcatccgtgaaagcggctgccggatatcggttaccagggtaaaagcagaggatcagcttgtaaatgagatagaagagcagctttccaaaaaagtctccagggaggagctgttaaaccgggatccggatcgaatttacgatgcagcttaccgtaagaggctggagacatccttccacttccgttatccatatgaagccgatgtggccctgaatacgaagatgtcggtttcagagctgaaaaaagaagggatggaggcggaagaggagacggcgttcctcccgaccctgccggtttttatggaagaggaagaggtgagggagggaggcacatccagaggtacggcctaccaccgcgctatggagctgctgcccttcagccagatcacgtcggaagaggaggtgacccgtcttctcaaccaatatacagaagaggggaagctggcgaaagaagccagagacatgatatggccgcccgatatctatcgttttttcaccaccaagttggggaaaaggatgcaggcggcagcagaagcaggaaagctgtataaagagaaacagtttgtgatgggaataccggcccgcgagatgggggactgggactcggacgagctggttttgatccagggtatcatcgacgcctggtttgaagaggaagatggcctgatactggtcgattataagacagactatgtgaacgatgcccagatactggttaaacgttacaaaacgcagcttgattattacgagaaggcactgactcagatgctgggaaggaacgtgaaggaacgctatatctattcctaccggctggggcttattgctgtttgataagatagaatcccgctcgcgggattctccgcctgcggagggcgcttcggcggcataatttcctgccgccgcagacattggctcacttagcgagtgtaacgagcttagtgaacaagccctctttagggttgcgatcctccgcaaagcggtttcatacgttcatttctattttatatttttcagccggttttttaaactgtctgagaattcctgtgtcattggattaacgggaacattccttggcagtatgtagccgaattctatgctgtcgttgcagtcgtctatcggaattgacagtacctgataggctgatgtctgggttgtaaaatcgtggattccgattccgtaaaaatcactgcaggaaatcaggtggagcagtgaagcgcggcttgtcagataggccattctggaaccataattcaggttatattgagaatcctgggagaatatacggtatgtaaaatcttcgcattgtcccagatacctggcaaaaccgtaaggcgccagggtatggagattgacaggttttccttccctgataagcgggtggtttgtggaaaccaggatgtgcggttttacatagcacagaaaatggtaatcaagagactgggaagccagtcttgccttaaactcaccgtggcgtctgccgtcaaaatgcagaacaccgatattggcctggcccgaatacacgtcttcaatcacttcatccgccgtaccttcactgagccggtggataaatgaaggattatccttgtgttttaataccacttcaataaagctttccataatatgggaatactttgtcatggaaaccaccagcgagtgcccggtgtcactgcatgaactgcggaacgtctccattttttccacttcgcggattatattttcggcatggatcataaaatcctccccgtcaggggtaagggaaacgccgccccttgtgcgctggaacaaaacggcgccaacggcattttcaagttctttgatgatcttacccagatacggctgggaaataaagaggctctgggcggctttattgatggagccgagcctggcaacggtgatgaaatactccagatgctttaaattcatatccatattcattaaaaatcccctcccaaaagacagttacagtatatcacattgggggattgtttgaaagaaatagatttaactgaggttgggaggatgcgcccggaacggaccatgtccgatgtggtgagggggctggctgagtcttccgtccccggttggagggtgtcgtgaggggggaatccggccggaatgaattgctgcggggaccgtttacactctttggagtgcgcagcagtgctaagctcgtgagggacctcgctaagcaccggcggactcccatgtcccctccgcaattgattccgcctacttcccccggtcagggtttcgccggggacagaagactcaggcggaggttttcgcggcaccggacatggtccgttccgggcgctgattgtctctaaccttaaatggggagagccttgtcgcggccactacgtgtttccggcaggttgatatcaagccttccacaatttttaaaaaagacgcagtgaaggcatatcgtatttcccgcccacggaagttctgagtggccgcgacaaggtccgtccccgcacttaacgcatgagacactcagcggccgcaggccggcggacgggccaacacccccggcggagtctttcgtcccggcgaaaacctggcctcggggcggaggggaagataaagtctgcggatgccgcctaaatccatcgctgattagcgaggtcctgtcgagcttagcagcgcgatgcatttcacagagcgggagcgtgctccgcagactttatcttcgcccgcagccccaaaccacaacaatcctccccgggacgaaagactcatatacacacccaaccaccccgtccgctggccgtaccggcggcgtcctcatttgcttaattaaaattgttcaatcagtttgttataaggttatatcgaataggaagtatacataaaaagttatatgagttataatcaatatataatacaaaccggtatcggccggaaaggggggagaaaagaatggttcaggaaatacttgaacaggcgatggaagagggcaggaaagagattgtccatggggaaacagcttcttatataccggagctgggaaatgtggataaaaatcatctgggaatctgtatctataccgccggcggcgaagttttcagcgcgggggataccgatgtccgcttcacaatccagagtatctcaaaggtgatatccctggcagcagctctggaggtctgcggctttgataaggttttcgcaaaagtgggtatggagccgtcgggtgatgctttcaattcgctggtaaagctggatcttaccagcaactatccatataacccgatgattaattcaggcgcaatcgccgtggccagttacctgatgccggtagtcagttttgaggagatgctgcagttttccaggaagctatgcctggatgcggaaatcattctggatgagaaggttttccagtcggagatgacgcacagcgcaagaaacagggcgattgcctatttgctggagagtaaggggattatagaaagcgatgtggagaaaagccttgatctctatgtgaagatgtgttctctgggagtgacggcaaaaagcctggccggattgggaatggttctggccggaggaggcatccacccggttacaggggagcgcctgcttgatgcggatgtcgtcagggtggtgaagacgattatgctgacctgcgggatgtacgacggttcgggggagttcgccgttcatgtgggaattccgtcgaagagcggtgtcggaggaggaatcctctcagtagtcgaaaaaaagatgggtattggtatttacggtccggcgctggatcaaaaagggaatagcattgcgggtggatctatgttaagatatctgtcggagaagctgcggctgcacatgtttgccgaagaatctatctaactgcttcagatgagaaaatccggtgaaacgggttcagccgggaatggtgggtttgaagctgaaaaaagaaagggaaggtgtatatattgtacgcagaaattattggattacttagcaattggctttacagttacatactgattattctgcttttggggcaggaatcttttttacggtaaaaacgaaatttatccagttccgttatttaaaagagagtatccgggttgtaaaggagccgaaagatgatgataaatccatctcatccttccaggcattgatggtttccaccgcatcgcgtgtcggtaccggtaatattgccggaatctccacggctctttgcatcggaggtccgggagccatgttctggatgtggctgaccgctcttctcggcagcgcctccgcatttgtggaaagtacgctggctcagatttataaaaagagggcggacgacggaagctcttacggaggtccggcttattatattcaggcagtgctgaaaaagcgctggatcggcattctgttcgccgttgttttaatcgttacctacatgggcggttttaatatggttgcggctttcaatattgccgatacattcaaggcttacagcttttacgatgcgtccatgacgccaaaaatcgtgggaggcgttctggcaatcgcttttctgatctgtattttcggaggcggcaagcagatttcaaaggttaccggcgtgcttgttccggtgatgggagttttttatatcgcagtttcactgttcatcgttattacacatatcaaccttgttcccggcatgattgcagatatcgtaaagggcgcatttgactttaaggcaatttttggaggctttgcaggttccgccattatgcagggaatcaagagaggattattctccaacgaggccggtgtcggttccgctccgaacgcggcggcatcagccggcgtatcccatccggcaaaacaggggcttgtgcagatgctttccgtttatattgatacgattgtaatctgtacggctacggccttcatgcttctttgctccggcgttgaaccgtctaaagagattgcaggaatgagctacgtacaggcagctgtggcaaattccctgggaggcttcggcacaattttcattacggtggccctttgtctctttgcatttactacactgatcggcaacttctactatgcggagatggggcttggctacatctgcaataagacgccgggcagcacattaatacatgcattccgtattctcgcggcagtcattgtctgcttcggcgctacgatggaattcagcgtagcctgggatacggccgatgttctgatgggtctgatggcgataatcaaccttccggttattattcttctcgcgaaaccggcgattctctgtatggacgactacattaaacagaaaagagcaggaaagaatccggtatttaaggcagcggatatcaatctcgaagatgatactgatttctggaaataagacataatcaaaaggatgtatcaaatgccgttttgcattgtcaggcatttgatacatcctttttgccttctttgctggaatgcacagaaactgcataaaacgcagtttcgcgccgtgtaactcgggattttcgcgcagaaaacgcacgaaaacacctcgcaggacataaccgtgagaacagtaacaaaaaattcttacacttcctttaatattatgcacactctttgacaagcggtataaaaaaagttaaactggttaaaagaggaaataataaaatagaggtgagcattgtgagaagactagaaataaaacggaatattaaaacatatacggcagcggcggcagtcacagcttttgccgtttttatgcctctggcggcgacaggctgcagccgacaggctgaggtagatgcgacggctgcgaccgtccagggagaaagcggcgcaaagacagagtcagacttggcggatttaaaagaagatacactgacggcaatcggaagtgcggatacgatggtggaatcgggaagccgtctgtttttcaaataccgtggaggcatatggagtctggataaagagaccgataagctggaacaaattaaagaatttgccgaaggggagttgaatggttccttttgggtttacaggggaggtctttattatgacataaattccgcaaagggagaggattcggcgaggatgtacgccctttaccggctggatttggagactggagaggagacacatctgactgatttagtcaatcaggcatcgggaatttatgcttcccgggatgttctatacgtaagcgggtataatctgaatcagacatttactctgaaggaggacggaagcctgggcgaagagcttccggtggagaaaagtatattcggacggataccggacggctgcaaggagctttacaggggagtcctgccctatatggtggagcattacggatatatgccggtacagaatgacaaatgccttgtaattgccaatgaggacggcagcggtgcaagagaagttccggaggtcacaaatacctcctccgttctgtttgataagggatttttctttgtgttattccaggacggaaacggcaatacacagtgttaccggtacgactcaaagactcttgagaagacaatgctgtttgaatcaccggataacccgcagttaatccagtacagggacgggtatctctatttcaggacgaataaagcttatcagactgtcagtgagggaacgcagttctataaagccgaggtggcgaccggggaaatttcaaaggcggcggctatcatgacagagccgggaacactgaatatgtatgacgataccggcaacttttttgtgacaggggatgccgtctactgtcaggagataaaggattacggggtttacatcggcaagacattgctcaatgcaaacgatggcggagagaagacactgattaaaccggctctctatcagtcgccgattaacaagctgggacatgtggaggcggaaaagaaagaactgccgtgttcctgcggcgacaagacagcgctggagatgtatgtggagaagcttgtattcgatggtgacggcgatgcgatccgagcgatgaataaagttatggaggagcggcagcaggcgcttcttaaatccggtgacgacatggtttcctatctggacgaagcgtgggttcacagttccgacttccggaccacaaccctgacatacgaaatcgccgggattaattatctcgatgcgcgttatgtctgtgtagaggcggacggatacgagtattccggcggggcacacggcaatccgttcagagattactttgtctttgaccgggaaacaggaaagcagttaacgctcagcgatatcgtcggcaatcctgtcgaggagctgcaaaagattgtcagcaaggcattccgtgaactggctgaaaaaacaaactttgcattcgaagcgcctgaggatttggaacatacggttgcagatgacgtgagctatgattcaaaattttacctgacgcccgaaggcttggtattttattacactccctatgagatagcgccttatgcggaaggctttccggaagtgacaattccgtatggcgatttagatatgaagattgaaataaaaacagaaagctaaatgaatctcattcccgaaaacctatgataattcagacagcataactgttgccggatgcccgctgccactacattttcgcacggtcagcgcagtcagtgcgcagacctgtctgaactgttacgaaaaccagcgaatgcggaataactgacgtaaaaaaattctttacgaatattccagtctatggcataatatgtagaagaaacttgcagaataagcgcaggaggatacggtggccgaagtatcgtgctacaggtttcttcctgcgctattttcctgcagtggaatatccaaaagaaaatgggaggtagaaatggaaagtcatcgcattatccaagttgaggaaaaggttccgtttaatctgttggttcccctcagtattcagcacatgtttgccatgttcggcgcttcggtgctggtaccgtttctgttcggtatcaatccggcaattgttttatttatgaatggtgtaggaacactgttgttcattcttgtaactaaggggaaggctcctgcttatctgggttccagctttgcatttctcgcaccggcgggaattgttatcgaaaaatttggttacgcctatgcgctgggcggtttcgtcgtagtcggattctgcggctgcattctcgcttttatcatttataagtttggttcggagtggattaatatcgtacttccccctgctgccatggggccggtagtggccctgattggactcgaactgtcggggacggccgcaagcaatgccggtcttctcgatgaagcagtcgatcctaaaaatatgattgtattccttgtaacgttaggcgtggccgtattcggttccatcctgttcaggggatttttgtctgttataccgattctgattgcggttattttgggatatgtggctgctattatctgcggactggtggatttcacacaggttgtgaatgcccctatatttgccattcccaatttttcttctcccaaatttaatccggaggcgatcatgattatcctgccggtcattcttgtcattacatctgagcatatcggccatcaggtagtgaccagcaagatagtgggccgcgatcttttaaaggatcctggactccaccgctctttattcggagataacttctctacgatgctgtccggatgtatcggctctgttccgactaccacctatggtgagaatatcggcgttatggcggttacgagagtttacagcgtgcgtgttattgcgggcgcggccgttctttccatcgtatgctcttttatcggcaaactgtccactttaatcagcacgatcccgggcccggtcatcggcgggatttcctttttgctctacggtatgattggcacttcgggccttcgcatcctggtggattccaaagtggattacggcaattccaggaatctggcgctgacctccgtcatatttgtgacgggtctttccggaatcaaggtcagcatcggtaatatccagatgacgggaatggtcctggcctgtgtggtcggaatgattttaagccttattttccatctattggaacggtttaagctgacgaatgaatagggattcccattgaaaagatcggcaataacaagtataataatcaaaggagaattaaacaggaaataaacaggaggaagatcgggatggaatcagtaatcaggaagaatgccagcggcggaaaaggtgaaatctcagttaaatatattctgaatgaagaggagatgaacggaaagggaaagatgttctcggaagtgaccattgccccggatgttcccttggttatcatgaacatgtgggcaacagcgagacctattacattatcagaggtgagggcgaatacaatgacaatggtacaatccgtacggtagtacccggagacaggacttttaccccagcggtttcagccatgggatggcgaacaacggggatacggatctggtattcatggcgttgattatttacgattgatactgggaaagcggttaagctttctgcaaggcgggccgctgcacattcaggtacagcggcctgatttatcggaagaaaaggggacggagatgagaaggaagtcaggggcctgagagagaaaaacggagggataagagaaaatgccggcggcagaaagtttcagatgacgctgttcggaggcatcgtgctggtgggactgctggtgatgacagtaaagacacggaccggcgccgaagccgtactttttaataaaaattcggagataacgctttatgcgaaagcgacggtaggggcggaaccggcattaaacgccgccaaattcttccccgacgaaaaactcgatccggctaaattcagctatgatctgagcgaatgtgattttaatacacctgggacatatcgaattccggtatattacggccaggaggaaacggactgtgtgatacagcttgaagtatattcatccggccgcaaggtaccggagacaacggggagcatgagcggtgattccctgagaaacggaaccgggcagtctgaaggggagactgcagattgattatttagaggcaaaaggaggcatgggatgaaattctttcatatctcagatttacatatcggcaggcagatgaacggatacagcctgagagacagccaggagaatgcgctgtcccggattatagcgtatgcgcagtccgagaaaccggacgcggtgctcatctgcggcgacatctatgataaatcggtgccgtccgccgattcctatacggtgtttgattcatttttaatccggctgtcctccatccggccgtccataccggttctgattatagcaggtaaccatgattcaccggagaggctgtcctatgcctcttcttttttagagggccatcagatttacatatcggctttaccgccgtcgtctccggaggacaggcttaagaaggtgacatttgaggacagatggggaaaaattaatttttatttatttccctttatcaaaccgggctatgtgcgccatctatttgaggaaggggctgttaccggctatgacagcgcctttcgcgctgttctcagcagggaagagataaacggcggggagcggaacgtcattctggcccatcaattttttacctcgggggacaaggggccgtcgctttgcgattcggagtctgcgatattgactttgggcggtctggatcaaattgacgtatctgcactggcggactttgattatgccgcactggggcatctgcatggtcctcagaaggtgggcagggaggatgtccgctacagcggaaccccgtataagtattcggtcagcgaggaacgccaccggaaagcagtcaccgttgttaccatggaagaaaaaggagtggtaaaaatagagagtctgcctttggaatgtgttcctgaagtgagaagactgcggggaaccctgacggaagtcctggctatggccgattcagataactgccatgattatctcagcattaccttgacggatgaggcggaggtgttcgatcggaaggaacagcttgaggagacgtacgaccatattctggaaatacgcattgacaatgaaagaaccagaagaaagctgcgggaagacggggaaaagatagaggttcccgatccgtttgaggcattcggcctgttctacgaggcggtccgtcattgtccgatgacaaaggaacagagggaaatgatgtacaaggtgattgaagaggcaaaggacggggaggtgggcagatgaagataggggagtttgccagagtctgcaatgtcacaaaggatacggtccgctattatgtcaatatcgggctgttgataccgaagatgcagggcagccagatgagctttgaagagagggagtatgcggattttaactacatccagaagctcaagggaatgcgcttcaatataaaagagatccgggcatttctctatctgagacggatgtccaatatgattgagcctgccacaatcgatgagtgtgtgaaactgttggaggataaaaaagagtgtctcaccggcgaactcaaaatgctcggaaacagcattcatctgattgaggacgagattgagaattttaataagaggaagaatgccgctaagaacgaacggacgggtgtgcctgtcggtacgattccgctcctggtatgtcccaattgcagacagcatctgcacattgaaaatgcggaaattaactacaagtatatttatgagggaatactcagctgtccctgcggctaccatgcgacaatcgagaacggtatagtcaggacggaaaatatatatgaaggaagttatgaccggcctgatttgcgccggaaactataccatgatataggagaggactgggaaatctatgtgcaaaaatgcagtgatgccataatagaacggattgacagaggtgactggaacggaaaggtaataatggaagcgaatgtcaatggtttcttctttacatacaataacatccatcaattgcccaggaactgtacctatattatcgttgacaaatattatgaagtccttgccatgtataaggagctgttcgaacggctgtttcaggggctggatatcctctatatcgcggatgcttcagaacggtttcctcttcaggacggctgcatcgacttatttctgagcttttatggagagatggaatattctctttatcacaagaatacgcaattagaagatatccttcacctgatgaaacccgacagcctggttgtagggggattcaaagcctggagaaggaagcgaagagcagacgcctgctgcttgagcggtatccggaagggaatgaaaggcggattaacaaggaatttctggaggaagattataagaaatgcggctaccggatgtctgctgcaaaggtgggacagattatgaagacagaggatcaccatatgtatacctgtcatcttgacggagaaccgctgacgatttattattttgaggctgaaaaagagggctgaattgttatgctgaatctttaaaaagtggagtttactccacttttttgctttttttatctggttatggggattgacattcagcagacttcaggttgtaggatgggaaaatgcgaaagaacagatagaaagaggagatgcatatgggaagaatactgacagcggttatgatggttttttttattgccggagcggcagacaaggcgctgctgaaaggaagactggggctggcggcggaatttgataagggattcaattcgaccggctcactgacaatggcaatggcgggaatcatgtgtattgccccggtggccggaaaaattcttacacccctggccgcccctgttttcctgaaaatcggggcggacccggctatgctgtccggaatcctgttttcggtcgatatgggaggctatccgctggccgtggctatgacggataacagtcaggtgcagattctttccggtgtacttctgagcgccatgatgggttctaccgttatttttacaatcccggtggccttgagtatgtgccgtgatgaagatcggagaccggtttcaaagggggtggttctgggaattattgcgattccctttgggcttattacgggggctttgactgccgggctgcccggacggatgattttgaccaattcggtgccggttattgccatagccgcggcactggccgttattttaactgtttttcccgaaccgacactggccggctttaaaacattcggggatatactgaaatgcatctgcatactttccctgacgctggcgtcgttggaggaggcgcttgggattacgctgctgcccggaatggatcctttgggggagcagttgaaaataatcgggctgatcggagtgacgctggccggagcatatccgtttatccgtgtactcagcaggtgcatgtccccggtgctgcgctgcgtggggaagatactggacatcagcgatgcctcagtggccggaatccttgcctcccttgccaatcctcttccaatgtttgacctgataagcgaaatggatgaccggggcaaagtggtggcgatggcctttgccgttcctgctcttgccgtattcggagatcatatgggctatgtttcggccgtatgtcctgatgccgtaatcccactggcggctggaaaactgaccgcaggtatagtcggactgattctggcggaaatctttgagtctgctcctctttttccgtccaaacgaaaagaaattgtaaaaaacaggagccgaatgtaaagttttcgaaaaaattacagaaaaatacaggttgacatggagctgtcccaacatgatagcgttaagacatacaattactgaatcccgggaatggtaaaagtaaatgaaaaagtcaagcagacaaaggaggaagtaacatgagcaatcctatcttaacgtttacaaattgggtgtggggatatccaatgttaatctggctggtgggtggaggcatctttttgtccttccgttacaagtttatacagtttacaaagctgggatttgtacttaagaacacaattgtaaaagcgtttaaaggcggagaaataaacagcgacggcaacaaaatttcaggctataaggcggtgacgggagcgctcgcatcgacgcttggggccggaaatatcgtgggaacggcaatcgccataggctacggcggcccgggcggcgtgttctggctgtggctgacaggcctttttgcctgtgtaattaaatatagcgaggtagttctcggtatgaaataccgtcagcgggataaagagggaaaatggtttggaggccctcagtattatcttccgaaggcgacagggtggaagtggattggatttgcctatgctatcagctgtgctttctgcctgttccttgcagcttctgcccagatcggctccgtggttgataccgttgagacaattcacattccgcgtatcgtatcgacagccgtgctgattattgcagcggccctgattgtacttggaggtcttacaaggcttttgagctttacggaaaaaatcgtgccggtcatgagcgtgatatatatggcggccggccttgtcgtcattgtattaaatgcaaaagaacttccggcagcatttgcgtctattttccagtatgcatttacaggccgtgccgctgtcggaggtttcggaggcgcgacgcttgccatgtgcatcagatggggcgtgtgccgcggtgtctattcgaatgattcgggtaccggagttaccacaattacccatgcggcagcagatgtgaaccatccggttcagcagggaatgtggggaatctttgaggtattctttgatacaattgtcgtatgcagcgttacatgtctggtgattctgacaaccggcgtgtggcagacggacgcatcagtatccacgctcaccattgcaggattccagaaagcgctcggtcctgtggcaggcggatttattgtctctctttccctgacattattctgctttaccacagcggtggcgcagacattattcggatgtgatcagctggtgaaaatattcggggaaaaggctggaacatggggaaaatacgtttacctcggactgatgtttatcggaggcatggttggaatcagcgccctgattaattacgtggatttcggctccttcctgattatattctttaatatgattggtgtttacctctgtcatggggaagtcaggaagctgacggaagaatatttctcggatacagaaaaatgggagacacaaaaatggcagccttgggttgaaatggaagagaaggacataagaagcagccatcacgaatagacgaacagaaaaaatattaacaaatggaggaagaaacatgaaaccattgataggcatcacatgtaattatgattacagggatgagattgggagcgtatcccatatggggatagccggacagaaatggcattttctggcggacaattacattgattccatagaacgggcaggagggatcccggttatgatacccatctgccggaatatggaaacagtaaaggagatggttgccggaatggcaggcatcctgttcagcggaggccatgatatcaatccgcaggaatatggggaggacgctaaaagttactgtggaaccatcatgccgatgcgggaccgccaggatgtggatctggccagatacataatcaatgagaccggtaaagcggtactgggaatctgccggggaatccaaattctcaatgtcgccgctggaggaaatctgtatcaggatttggagaaagagggcgggttcggccatcatttcaatgatatgtatccgatgaacagcgtatcccaccgcattttggtaaatgaggggacaaggcttggaaaaatcctgggaaaagagacggccggggtgaattcgttccatcaccaggcagtcagggaaccgggaaccggcttcatcatcagcgccgtgtcaacggacggcgtgacggaggcaattgagatggaaggcagccgttttgtcgcggcaacacagtggcatcctgagatgatgtacgattcggaagaacagcaggcaatattcagggcattcgttgaggcgtgccgggtgaaataattactccagggaggcatttaaattccgcagtaaaggggatttagagtgcctccttcttttggtgtaacagttcagacaggttgctgctactaaaacatatggagatttaactgaggtgtggaggacgcgtccggaacggaccatgtccggtgtagtgggggagtctgtctgagtcttccgtccccatgggtaggttgttgtgaagggggaatccggccggaatgaattgctgcggggaccgtttgcactctttggagtgcgcagcagtgctaagctcgtgagggacctcgccaagcaccggcggactcccatgtcccctccgcaattgattccgcctccttcccccggtcagggtttcgccagggacgcaagactcaggcgaaggttttcgcacaccggacatggtccgctccggccgctgattgtctccaaccttaaatggggagggccctgtcgcggccactacgtgtttccggcaggccggtatcaaatcttccgcaattctttaaaaaggcgcatggaaggcataccgtatttcccgcatacggaagcgctgagtggccgcgacaaggtccgtccccgcacttaacgcgtgagacattcagcggccgcaggccagtggacggggccgatatacttggcggagtctttcgtcccggcgaaaacctggccttggggcggaggggaagataaagtctgcggatgccgcctaaatccatcgctgattagcgaggtcctgccgagcttagcagcgcgatgcatttcacagagcgggagcgtgctccgcagactttatcttcacccgtagccccaaaccacgataatcttcccccgggacgaaagactcatatacacaccccaccaccccgtccgctggccgttccggcggcgtcctcacctgcttaactaaatctctaattaggtcatagtagcctcgccgtctgaaaattctggtacaagtaaaatgatttatggtataatgggctataattcatgttcagaaaccaggagaggagcgataagatgaaacccttaaaagtaaccatgtctgctttcagttcttatgcaggtatcacggagattgatttcgaaaaggtagatcacggccttttcctaattaccggagatacgggagcgggaaagacgacaatatttgacgcggtttcttttgctctctatggcgagaccagcagtgacagccgcgacggcacaatgatgcgcagccagtatgcaaaggacggggatgagacctgggtggaacttgtctttactgataaaggaaaggtctaccgcatcaggaggaatccggcctaccagcgggcgagcaaaaggaaaaacagggatggagagcgcacggtcactatggtgcaggcaaaagccagtctcatcctgcctgatggcagcgaatatcccggacggctcagcgagataaatgaaaagatccgggagattgtaggtgtggacaggaaccagtttgcccagattgcgatgatagcccagggggaatatatgaaactgctccacgcgtcgtcgaaagacaggaaagagatattttcccgggtgttcaatacgggaatttattggaggatccagcagaagctcaaggaaaaaaacaatgaactctatattaagctgaaggacaacgagaatttatgcttgcatgaactggcccagatttccctgccggaagacagtggaggactggaggcgcggtggcgggaggtatcaggaaaactggagaccagaagcgaagagatatcagagctgctgagcgagatagccggggagagtgaaaagcaggacagggaagcggccgggcggcaggagcagttaatagaaaaactatctgtccttaaccgtaacctggagcttgccagggaacagaacagacggctggatgaatgcgaagcggccggggaaacgcttaaaaggctggaactggaagtgccggaacgcggccgtgatgccctgaaactgaagcgtgccaaacaggccgaaccgctccggcctcttttgatgaattgcgagtcggatgaaagcgagcttgcccggacaggcgaaaagataagggggctggagcaggagcttgcggagctggccatgcctctgggagaagcggaaaaagccatgcaggacaggatgtgcgagctgtcaaagcggcgtcctgagctggaactttccgcaggacggctgagggaggcaatgccttcctatgcacatctggataaaaagcttaaggaggctgtgaacgccaggcaggaagcagacagactgaagaatgaaatggaggcggcggaaaaaactctgagggagctggaaatcagaaggaaggagctggaagggcagggcgcccgtctggcggaagtcccccttgcactgtcaggaatgcagggcagggaagaggcggtaaaagtccgcctgtcggatttgaggcagttacagtcggatttggaacttcaggagaggcttgaacatgatctggaagataaaaaaagacaggttctggcggcacagagaacatttgagaaggccgaggcggaatatgtggagataaaccgcttgtttatctccatccaggccggtatcatggcatcggctttggaagaaggtgccccctgtcccgtctgcggctccctgcatcacccgaagaaggcggtgctggaggcggaagcagtcaccgaaaagcaggtggaagaggccaagaagagaagggagagggcggaactcacactacggaaagcggcatcggagagccaggaatacggaatccgttcagacgggcaggctaagctggtcagcgcgctgacggcaaaactgctggagggagatgcatcggctgaggaaagtgctgcgcttgagaagaatgcgccggaccgtagaaatatcaaagaacagaggcaatgggtgagtttggcaatcggagcatgccttacaatggcagaggaaatatcgaaggagcgcgcccggctggaacgtgaggctgaagaactggagcggaacaaaacgcagcaggattccctgagaaaaaaatgggatgaacagcaggagggactgcgggaactgaggccgagggctcaggaggctgcaatccgcagcagccggatacaggttgagacggagcagcttcgaaaaaatcttttatgggaaagcaggagtgacgctgagcgggagctggagcgcctggtgaacgagagagtgctgctggaacaaagcgccggggaggcgaaggacaaagccgacaggataaaaagcagtataacgcaaaaggaggcttacctgtcttccgagagggagagagaagccgtactggggcggaaggtggaagaaaacaggaaaaagtggcaagaagctctgaagaagaatggttttgcaacggaagaagagtataggaattctgttttgacggataatgagatagccatgctttccgaagatatggaaagattcaatcaagagctgttaaaggcgaggacgatcttccagcagctcagaatggcggcaaaaaagcttacgcgtgtggaagaatctgagcttttgaaggaaagggatatgctgacggacgaaaaagcaaaagcagcggagagggcagggcttttgtcggcccggagaatccggaatgaggggcatacaggaaccttcaaaagctgatggaggaacgcaggaagctgaaggaggaaaaacagcagatagaaattctctataccactgctgacggaaaggtgaccggctctgccaggatcgatttccagacctatattcagagacagtatttcaggcagatgattcatgcggcaaataagagactctgcatcatgacggacaaccagttcctgctgcaatgcagggacatggagctgctggggatgaaaggcgaggtgggcctggatttagatgtctacagcatgagtacggaccgaacacgtgatgtaaaaacactctccggcggagaatccttcatggcggcgctggcaatggccttagggatggcggatgtaatccagagtacggccgggaaggtcaatattgatgcaatgtttgtggatgagggcttcggttccctggatgagtcttcccggatgaaggcaatcagaatcctgaaggaactggccggagatcgcagactggtgggaatcatctctcatgtgacggaattgaaagagcagattgacagaaagcttctggtcacgaaaaatgataagggaagctttgtgcactgggagctggaagactgacggaggctttaaaacaatgattcactgtcttcgcacaacttgctcaaagcagaaaggaaacagacatgtcagaaatatttatgatatcagacacacatttcggtgataatggagccatcttaaggtacgagggaaggccttttaaaaacggcccggagatggacgggaccctgattgccaactggaacagaaccgtgaaaaaggaggatgttgtctatcacctgggtgatgtggcctggaatatggataaagaagctttaaaagcccttatatcggggctgaacggcaggaagatactggtgatgggaaaccatgacaggaattttaccgtcagggaatggatggagacgggctttgaagaggtgtactctcttcccgttgtgctggagggttttttcatgctttcccatgaaccgatgtatgtaaattcctacagtccttacggcaacatattcggacatgtccacggaaacccgatgtacagggataagtccagccacagcttttgtgcctgtgtggaacgcatcggatatacccccgtacagtttgagaaaataaaaaacgagatgtccagggagcagcgtttggaggctgcagagacttaaaattagttaccgttcagccttcggccaaactgcaactaatgatgcagcggctgaactgtttctaaaattacaaaaatcgacctgcgcatctggaatcacccggccttttgtgctatagtaaaaagatagcgattgaacgatagacagaatgaaaggtgatggaagtgacaattgtaataccgggagtgataaccgtatcatttctttccctgttttactgctgtatgatgccggaagtcggcaggaaagacaggctggaagcatttgaaaaacagtacatagcccacaggggctttcacgacaatgcgtccttcaacccggagaatacaatgcctgcctttgagaaggcggtggagaaagaatatgggattgaactcgacgtccagcttacaaaagacaagattcctgtcgtagtccatgattatgacttgaaacgtgtggccgggactgcccgcaggatagaggactgtacctttgaagaactaaaaaattatccgttgttccgttccggacagaccataccggcgcttcaggatgttctgcgcatggtggcggggagggttcctcttattatcgaactcaaggtagagagaaaattcagggagacctgcgaggctgttgcaaagctcctggattattatcacggtacatattgcatcgagtcgttcagcccacttgcgctgtggtggttcaagcatcaccgcccagaggtggtgagaggccagcttgccacgaaccacaggcgggaaggactgaaaacaccctggtatatagaggggattcttacgaactgcctgttaaacggattttgcaaaccagattttatagcctacaactgccgttttacaaaaacttttccggtgacggtcctgcgcaaattttacagatgcaagatggcggcctggacgatccggagtcagaaagagcttgaaaaacataaaaaatattttgatgtgtttatatttgacagtttttctccggaggaggataaattaagcaggtgaggacgcagcctcaggccagcggacggggtggtggggtgtgtatatgagtctttcgtcccaggggtagactgtcgtggtttggggctgcggccgccgattgtctcacgcgtaagcgcggggggcagaccttgtcgctaccactcaatgcttccgtgtacgggaaatacgatatgccttcaatgcgccttcttaaaaattgtggaaggtttgatatcagactgcctggaacacgtagtggtcgcgacagggccctccccatttaaggttagagacaatcagcgtcccttccggacgcgtcctcccattctcaatataaatttcttaaaagaagttgcatttttcataaaacctgttacaatgatagggacaatttaataatgagagaatattacgaattcaagaggtaaatgagatgaaaaagagacacctactttcaggcgtaatggcacttctggtatctgttgcactcagcgcatgcggaggcgataagaatgcgggaggcacctcggcgggagagacgaaacaggaagcttccgcagaagaaaccagtaatactctttcagaaggaacaccagtaccaggcggaagtgttgtattcggtatgacacaggacctggctagtcttgacccccacccagagacggacgcaggaactagagacgtggttttcaatttgtacgaagggcttgtaaagcccgcttcagacggcagtttagtgccggcagttgccagtgattatactatctcagatgatgcaaagacctttactttcacattgagagacggtattaccttccatgacggaacaccggtgacagttgaagatgtcaaatattccattgatcgatatgcggagattcagggcgaatcctccgctttttctatgctttcggacgtggtcataaaggacgacaagacaatcgaggtgcttttgaaagagggagactctgagtttatcacagagcttgcgctggcggtaattcctgcttccaacgatgatccggcgggaaacccaatcggaacgggaccattcaaatttgtatcctacacaccgggacagaacctgattctggaaaagtacgacggatactggcagaaaggccttccctatcttgacagggtggaattcaaattcacaccggatgtggatactgcgttcatggagcttcaggcaggcaccatcgatattttgaagtacctgactacagcccaggcccagtccttaagcagtgaatataaccttgtggaaggcagcatgaacctggttcatggaatgtacttaaacagcggctatgaaccgctttctaatgcaaaggtgcgccaggctctctgttatgccgtggacagggatgcaatcaataatttcctgtttggcggaaagagccgtatcatcgggtccaacatgatcccgaacatgacaaaatattatgagccgcaggctgaatcagtctatacttatgatgtggcaaaggcgaaggaactgcttgccgaggcgggctacccggacggctttgatctggagattacagttccaagctcctattcccagcatgtggatacggcgcagattattgccgacgaattatcgcaggcaggcgtaagaaccacaatcaagcaggtggagtggagtacctggctggaggaagtttacaagaacggacagttccaggctacggttattggttttgacggaacgctggctccgggcaagatgctccagagatatgtatccgacgacagcaagaactttatgcattattccaacgcagagtttgacagggcgttcaaagaggcatatgaagcagttgacgatgccgagaagacggctaaatataaagaagcccagatgatcctggcacaggatgcagccgcagtatatatcgaggatccggccaatctggtggcggtaaataaaaagtttgcaggctacaccttctatccgacatcggcggaggatatgtccctgctgtaccagattgcacagtaaaagaataaaatatcggtaagtaaaacagaataaatacaaaagcagtaaataccaggagggaattatgaaattctttattaaaaaactgataactctcattatcacattgttgttgatctccttcctgacgtttactgctttttctgttattccgggagatgcggcgctttccaggctcggaaaggatgcctccgaacaacaggtggaagcgcttcgggaggagatgggactcaatgattcccttccggtgcggtatgtccgatggattggcggcgcagttaccggagatttcggcgagtcataccgctatgaaggcatcagcgtcagttcgctgctgtccgaccggctgccggttaccgtccttttatccgtcatcgcactggtcattatcctcgtatgttccgtaccgcttggaattgcaagcgcgcgtcatgcgggagagtggggcgatatcgtaaccaatcagctgacccagataatcatggcgatacctcccttttttctggggatgatactgacctacgtatttggcctgatacttcatttattccagcccgggaagttcatccagccgtcggaaaatctgggggaagcggtcaaatacctgttttttccggctttggccatcgcacttccgaaaattgcaatggtagtcaagtttttgcgcaactcggtgatctcggagatgaacaaggattatgtgagaaccgcattcagcaagggaaacacaagaacgggcgtgctctatagccatatcctgaagaatgctctgataccggttattactttttttgcattggtaattgctgagatactggccggaagcattatcgtggagcaggtcttcagtgtgccgggaatcggaagattactgatatcctccatctcgaaccgtgattatccggtagtgcaggccattgtgttatacataacggccgttgttgtcattattaactttattgtggatgtgttataccagttcctggacccgcgtgtgaagacgtcgtaagagaagacggaaggtacgattatgaagaaaagaaattacaatctgattatagggacttcaattaccctgttctttctggcggctgcagtgattggccggttttggacgccttatggggcgacggccatggattcgttatccgtcaatctggcaccatgcctgacgcatccgatgggaacggataactttggaagagatattttaagccgtgtcatgaatggaagcggcagcacgttctttgtggctgtctgcaccgtgctgattggaggagtattcggcaccctgattggagcggtgaccggatattacggagggtggctggacgatgtcgtcatgcgtttaaacgatatgctgctttcatttcccagtattttgctggctttgattgtcatcagcctgatggggccgggcagatacaatattattctggctctgggggttctttttattcccagttttgcacgtattgtgcgcagtgaagtcatacgctgccgtgagcttgattttgtcaagagtgccaaaattatgggggcgggggatttccgcatcattttcctccatattctgcccaatgccggagtcagtattctgacggccgccgctatcggttttaacaatgcggtgctggctgaggcaagcatgagttatctcggcctcggtatccagccgccggaaccgagtcttggccgaatgctgtcggaggcccagtcttatatcttcaatgctccctggtacgcgatttttccggggatcacaattattttaattatattgggattcagtatggtcagtgaaggcctgagaacccttcaggaataggaggaaagccgtgaaaccattagtagaaattaaagatttgaccattggctttcaggaggggaagaccatatccccggcggtgaagggaatcagctttgaagtaagggaaggggaaatcctgggtgttgtcggagagtccggctccgggaaatccatgagcgcgctggcgcttatgggactgcttcctaaagatgcgattgtaacacaggggcagatcctttttaaaggaaccgatctgctgacgatgaaggacgaagaaaagagaaagcttcagggcagcaggatggccatggtgttccaggaaccgatgacctccttaaaccctgttatgaagatagaaaagcaggtgggggagagccttaagctgcatacctccctgtctgataaagagatacacgaaagggtgactgccgcccttgaggaagtgggactttcagatccggaaagcctttgcacgaaatatccgcatgaactgtcgggcggaatgcgccagagggttatgctggcccaggccacggtctgttcccccgacctgattatcgccgatgagccgacgactgctctggatgttattgtccaggcccagattctgcgtctgctgaaaaagatacacagggaaaataatacgtccatcctttttatctcccacgacctgaatgtgataaaggagatctgcgaccgtgtgattgtcgtatataagggggatatcgtggaggagggggtaacccgggaggtcctcttaaacccgaagcatgactatacgaagcgcctggtcgcctccataccggaggaccatgcggccggaggcaacggtcgggaaatactccgcctggaagacttaaacgtatattatgatacaaggacaggcgccttctggaaaaaaaagggcaaaaagcatgtcattcacgatgtatcgatgactgcctatgacggtgaaatcctggggatcgtcggggagagcggctgcggcaagtccacgctgtgcaagacgattctgggacttcataacaactataccgggactgttaaaatggatgataatctgaggccccagatggtgtttcaggatccgttcagttccctgaacccggcaagaaagattggatggattctggaggagccgctgcgccttcgcggcattacggacagggacaagcgcaggcagatggttgcggacatgcttgtcgatgtcggcctcgacccgtcatttgcggacaggaggccgagggagctgtcaggcggccagagacagagaatcagcattggaacagcgcttttgatggattccaggctgatcattgcggacgagccggtatcggccctggatgtcacggttcagtctcagattttaaggctgattctgaggctccatgatgaaaagaaaatgaccatcctgtttatcacccatgatttgaatattgtgcggcggatatgccgccgggtggtggtattgtaccggggagagatcgtagagtcgggacttgcggaggagatataccgcgcaccggcccatccctatacggaactgcttctgaattccgctccggacggagatacggctgcgtcggagaaggcggtggcagatatcggagaaggcgttccggccggtttccggggatgtttcttctacccgagatgtccgaaacgctgcagccgctgccgcgaggcgaggccggaggatacgatggttgctgcaggccatacggccaggtgtttccggctgatgtaaacttttgtaaaaacctttttcttgtaacctttccctgtttttagtataatgaagttgtaaagtgggaaaatgatacagggagggaagcatatggagaaagaaatcggccgtttacgtgaaatcttaagaaacagtaattacacagttgcgctctgcggctccggaatgacggaagagagcggttttatcggcatcaaaaagccggaacgtgcttatgaaatcgagcgtgtttatggagcgtctccggaagaaattttcaccagctcctactacaatacccgcccgatgcagttctttaaattttaccatgaagaaatactggataaaataccggaaccgggcccttccagccatataatggcggcgatggagagggcaggccatctgcactgcattattacttctaatatttttgatcaggagaagaggggcggctgcgaaaatgtaatcgatctccatggtacgatttttatgaaccgttgtcctcactgtggtgaatattactcggtagaagatatacaaaacagtaagggagttccttactgtatgatatgtcattcggtgatccggcctctcgtttccctttttggggagatggtggacagccgtatcatgacgagaaccaccgaagagatcgaaaaggcggaggttctgctgctgttggggacaacaatgcagtccgaggtgttttccaactatgtcaggtactacaatggacacaaccttatcataatccataaagaagagcattacatggatcataaggcggacttggttatcgttgaggaacctggcaatgtactctgccagttgggatattagaatatactttgtttctaaatggaaatccatagttaaggaaaaagggctgccggcggcagcccttttttgcagaggaaataacacgcgggcgtgacctctacagttttaatttccgcattcaatgctgatttcgttaaatttatccagcagatcttccaccttcgtaccttctttgtccttccctgtctgatccaggatagcatggccctggtgcatcatcagaagacggttgccgtactccacggcatagcggaggttgtgtgtgaccataatagtggttagcttcttttcccggacaattttcccggtcagttccatgataatctcagccgttttcggatccagggcagccgtgtgttcgtccagaatcagaaattctatgggggtcattgtggacatcagaagagccatggcctgtcgctgtcctcctgagaggacgccgaccttgacctccagcttatcttccaggcccagccccagcgtgcgcaggttttcacggtagaagtcgatacgctgcttatcagtaccgcgctttaagttaaacggcttcccctttgtatcggccagagccatattttccaggatcgtcatattggggcaggttcccatagcaggattctgatagacgcggccaatggtgcgctggcgtttaaattcaggcatccggctgatatcctttccgttaatgatgatccggccgctgtcaatggggatgctgccgcagatgatatttaagagtgttgtcttgccggaaccgttgcttccgaccacggaaacaaattcgttctcattgacagtcaggttaaaatcctcaaacaggcacatctcattgatggttccctgattataatacttatcaatatgttttaattccagcatttatctcaccttcttctttccgttttcactgactacaaggattacgaggaagaacgcagaagtgataagctttaagtagagtgtcttaaagccgaccgccatggccgcagagacgcatgctttatatacgattgttccgagtatgacggccgtcgtcgctttcagcttcccgaatctggcaaatacttttgttccgataataacgcttgcaaggcccataacgatggtgccggtgccgacggagatttcaaagaatcctttctgctggcagtatacggcacccgagagggcggcaaggccgttcgccagagccaggcccaggattttaacggagcctttgtccttcgcgagggaagtgacaagggtttcgttgtctccaacggcccgcagcagatatccggaacgcgttttcatatacagatcgaggagtattttgactgccgccacgatcagaagaagaatcacaacggtgctgaattcattcaggggagaggggagcccgtatacgaactcattgtcaaagatcgtatcccggctgaaaatcggcagatttgccttatcgcccgtgattcgaagattcagcgaatacagggccgtcatgacgataattcccgaaagaaggtcgcgcaccttcaatttgacatgaatcagtccggtgaccgttccggccagagcgcctgccccaaatgcaataaacagagtgagaaccggcggcattcctgccagaatcaacgtggcggttacagccgctcccattgggaatgtactgtccaccgacagatccggaaagtccaggatggtataggtgatgtagacgcccagagccatcagtgcatagattaaaccttcattcaaaacgccaagtataatagacatggcaaacctccaaatttcttcttaatgtcggcagaggtgaaaagcccgcggggcaggcttttcaccgtctgttgctgaggacggtgacctgtgcgcagagcgtacaggttatcgttactgtgtgatctcgtcgaacatttcggcggcatttgccgtcaggctttccggtaatgtgatacccaggttttcagctactttagtattcccataaaaggatgcccctttaatcacttcaaaattcatttcgctggcttttgcctcgccttttaatactttggcggccatctgtccggtctgtcttccaagagccacataatcaaggccttcagatgcaagacagccgactttgacctgctccacctcactgccgaataccgggattccctttttattcgcagcatccagaacaacctggagagagcttacaaccgtgttatcggtcagattgttaatacagtctaccttctgtaccagctggtctgcggccagcgggacatcggccgcggatgaaacgccgctctctacgatttcaaatccgtattcaggagccgctgctttgtattcttcgatggtggagagggagttaacctcgcttgtgctgtacatgattccgattttttttgcatcgggaagcacttcgcggatcatctggagctgttctgtcacaggaagcttatcgctggtgcctgtcacttcccctaccggtgaaccatccgcattggcaagctctgccataaccgggtcagtcactgccgtatagataacaggtgttcctgtttttcttgccgcactgtatgcactctgagcgattggcgttgcaatgccgcagattaaatcagcctttttagagataaagttagtgataatctggctcgatgttccgccgtccgcgttggcattctcatagaggattgtaagattttcaccttccacaaagccttcctcggccaggccctggataaaaccttcacggcagttgtcaagggaaccgtgtacggcaaactgtccgatgccgatagtatatttcccatcaacaaggtttcctgtatttacttccccggcttttgccggttctgtttctgttgctccttctgagacagcttccgtctttgcaggctctgaggtttcagccttatttcctgatgaagagcagcctgataatgccgctgcagccatagcgccgattaataatgatgcaaatactttctttttcataattctttcctccattaactgtttttatgattttaattagactgagtctgctcggcagtctcccgcgccggagcgcggtcgctttggcgacataattccctaccgccgcagtgtgaacctccgcggagcggtttttatttaacggaagaactttcctgttaaataaaaaaagccccagacacagtttcctgcatctgggacgaatttataaatccgcggtaccacccaaattgacgtaaagtccactcattcatatactaacatatatgccgccagataacggttgcggtttccgtcagcccatactgttgttcagggctgccctcaaaagtccattcggttaccaacttcatactatgcttccaccatgacatagctctctgtaatgtcgtaagataacgtactcctctttttcaacggttttattttttctaatcctaatacttttttcctgatttgtcaatagcgtttgcagaaaaaatatgatataatcgcttttaacagaaaatggaaccggcaggccttttggggagaggccgtccggctggatgaaaggggattgtactgaaatgaagaaactgctggtagtgattgacatgcagaatgattttgtggatggctctctgggaacagaggaggccatgaaaatcgttccggaggtgcaggcgaggattaagcagcacaaaagcgaggggcaggaggttgtctttacaatggatacacattatgacaattatcttgagactctggaaggaaagaaccttccggtggaacattgcaaaaaggagacagaaggatggcagctctgcagccctcttagcgggtatgaagggaagcgttttgaaaagccgacgttcggaagtgtggaattggcggcatatgccagggataaggattatgactcaattgagttggtgggcctgtgtacggatatctgcgttatatctaacgcacttcttcttaaagcggtgcttccgggcactccgatccgtgtgagggccgcctgctgtgccggtgtgactccggaaagccaccgcaatgctctggaagcgatgaagatgtgtcagatagaggttatttagcactgtaaaataatatttgacgtcttactgcaggctctgtaaaggagaacggatgaaattagccaagtctggaaaatattgtttatgtgcttttataatcatattcatatgtatatatatggccgtaccggtcaaagcggaagcgagacgtgtagtgcgtgtgggttttccggagcaggagggatttactgagaaggggcgtgacggccattattccggatatacctatgattatcttcaggagctatcgcagtatactcaatgggaatatgaatttgtggagatggctggtgacatcaatgagtccttaactgccctgctggatatgcttgccaacggcgaaattgacatgcttggcggtatgacatatagcgatgcgctggcggagatttatgattatcccggaatgtcatacggagaagtggggcttgttctagcggttgaggatgataattctgaattgaccccggtcaattttaccggccgtgaaatgttgaaaatagctgtgaccggtaatggcgggcgccagcaggatgcgatgataaaatacctcgaattgctcggccagaattatgacctggtccactgcgcttccagcgaggagaagcttaagctgcttcgggaaaataaagcggatgtgatgatggatactgaggccggaatctcaaaggaatgcagaatcattgcccgattttctttttcacccttttatctggctgtgaccagaggcaatacggagctgttgaaggaactgaatgcagggatggcggaacttaaggaaacagacccacttctgataggcaggctgcatgacgaatattttaatagagcggcgagcaggctcatttatgaagaaaatgagaagtcctatcttgcacagaataaaaccttaagggcagttgttttaaacggtaagcttccgatacagaatgttgcagcgaaaacaggagaggcagagggaattgccgttgatttccttaactatatctccgaggagacaggtttaacgattgaatatatcggcattacggatccggaagaataccgctcggtaattttgaatgatcaggccgatatcattttagcgcttcccggttcccctcagcttatggaacagtttggcattatccatacgctgccctatatgaatatttcacagatattggtcatacacaaaggactggaaccgggggaactgaaagggaaaacggcggctacgtacgatgcattcggaaaccgggatgaaaatgccggggaggagaagctgtattattcaccggaagcggccatggaggcagtcgatcaaggtgaggcggattactgctacatagataactattcgtttcaatattgtattaataagagagtttataaaaatatttcctctatcgtgctggccgagagtggcagccaatctatcagtatgggcgtggtaaaagattcagatttggttcttcacgggattttaaataaagtgatcgcatatatgcccgaggctacgaaagagagcattttttacgaaagctcgatcagccaggaacggacctcgtttttagaatatgtcagggccaatcctctgccgtttgctgcggcggttctgcttttactgacggcagccggagcggcttccctacacaatatcaggaacagatatgagatgagccgcaaaatggctctggaatatcagcgttacagacagctctcagaagtagttggagagtgtatttatgaatatgatttccgggggatgtcttaaaatttcttggtgacggtgtgtataagctgggtgtgcctgagacgatttccgcgttcagcgtttacgggaagcagcagcttgcagtgcgggaaatcccgcctgaagaatccctgtatcagtggatcatggagaagaaggacgggacaaaggatgtccaaatcattttcgccagggaacctgaaagatggtatcgtgttacatcgaaggtggttaaggacgattccggctatcccgtgtattcaatcggccgtgtatgggatatccagcaggagaaaatcgaaaaagacagactgcttcaaaaggcacaaaacgacggactgaccggtatttataattccgctaccatccgtgagaacataacgaaagcacttaatcagtccagctttggcggcgctcttctgattatggatatcgatcattttaagtcgatcaatgacaggtacggccactccgtgggtgatcatgtgctgacacaggtgggcatgaaaatgaagcacatattcaaaggcgaaatatacggcaggctcggcggggatgaatttgtcgtcttcctgccgcagcagatgacgagggaagaactcaagacaagggtggaaggcgcctgcgaagcttttaagacgatagaggcttcccctggctgggacaaaattacggtcagcataggtgttgcagtgagaacagacgagacaaagttcagcgatttatatgaaaaagcagatttactgctttacgaagtgaaaagggaaggccgtaacggatacaggatcggataatacgattctgtttccgttacggccttccggctatttacgtttaagcctggcaagatcggaataaaaaccgggataagagatattaacacagtccgcgtcgagtatttccgtctcgccttccgcagccagggctgttacggcgaaggtcatggcgatccggtgatcttttttactgtcgattacggcgccgtggagcgggcggccgccgtgaatgatcattccgtcctctgtttccgtgacatcggcgcccatggctctcagattttccgccatgacggtaatccggttggactcttttaccttaagttcggcggcgtcgcggattacggtagtgccctttgcatagcaggccatggcggcaagcatgggaagctcgtcgataagggtcgggataatgcttccctcaatgacggttccctgcagggctgaagaccggaccagcagatccgctgtcggctcccccgattcatttttacggttcaggattgaaatgttaccattcatctgcctgcacacatgaagaataccgtcccgggtcggattgatgcccacgttgcggatcagaacctcggaattcggaacaatcagggcagcggcgatgaagaatgcggctgaggagatatcaccgggaacggtaatacacaatccttttaaagcatttcccggtctcaaaacagccgttgtattttcagtgcggatatcggcccgaacgcggaaagcatcagctcgctgtgatttctcgagatataagattctgtgacacgggtttctccttcggcgtaaaggccggccagcaatacggcggatttcacctgggcggaggccacgggtgactggtaatggattccatggatacggcatccggtaattgcaagaggagcacagtcattgcaatggatacttctaatctttgcccccatcatggaaagcggttccataatccgcttcatgggccgccggcagatggattcatcccctgtcagggttacatcgaaatcctgggctgccaggattccgcagatcagccgtgtcgtggtgccgctgttgccgcagtccaggatctctttcggggcggtaagcccgcgcagccccctgccgtgaatcaggacagtttcccccttattctcaataggaattcccatctttgtaaaacaggaaatggtggagaggcagtctgccccctgaagaaaaccacgcacctcggtaaggccttgggcaatagagccgaacatgatactgcggtgtgatatggatttgtcacccggtatggtcaattcgcccgataaacggcgggctttggagaatttcataaacagaacctcatttcatcttcattcttctttcaggcatcagccgagaaagagtgtataattgtaatttttaaggcgtacccaggcagccgtcatggaggcctcatcatagaaggaaatccggagggcgccttccccgtgttcacggttatggttaatgccgatattcataatattgatgccctggcctgccagaatcgcggagattatggatatagtgccgggttcgtccacaacgtcaacagagaaggagtagtctggcgtgacggagccctttgaattgtctgcaaaggaattccggtagtcgcgtgaggattcgaacagccggtgaatggctccggaatctttactctctacatccgtaaggatatggcccagtgattcaatataccgtttgaggataactgctatattggcgtcgttggtcatgcagatttgttcccacatcacgggggaggaggaggcaatgcgcgtaatgtccttaaatccgccggccgcaagccgtttcattgtctggttctcattatcacagtcgtgaaccagatttacgaggctcgaggcgatcaggtggggaagatggctgatggcagccacgataaaatcatgctcccggtagtccagcacgagcggaatggctccgatggcttttgcaacccctgtcatgcgttccgtgaaggaagacggagtctttcccgtaggcgtgataatatagtaggcattctccaggaggtggtcggaggcattctcatagccggtcttttcggaaccggccatcggatggccgcctacgaagcagtcctccatcccgagagatgttaccgtctcatggatattcgttttggtgcttcccacatcggtaacgatagccccctttttgacaaacggtttgatctgctgcagataatcggcattatattccacggggtgcagaggaaaatgatatcacattccgacaggtgttcgtcgacaccgtccagaattacatccacaatcccatcccgctttgcctgtttcagcttctctctggtgcgcatgtacgccataatcctggtgcccggcgctctacgctttagtcctttggctacagagcctccgataaggccgagtccgataaacgcaactgtcaaatctgtcatagttaatcctccgtaaatgtattcgtaacgttcaggcaacgataacctgcacgctccgcgcacaggtcaccgccatcaatatgagtaacagtacagactgcataaactgttacaaatatgaaatgttacatcgattcattaatcaaaatgtcctgcccgaaagcccggcataaggtctgaggcggttcatcagtccgtcaaattcatcgaaagtcagggactggggaccgtcggaaagtgctttttcagggcatggatgtgtctcaatcatcagtccgtccgcgcctgcggcaatggcggccttggataaaggctccacgtatgccctcacgccggtcgcatggcttggatccacgataatcggaagatgcgtcctctgcctcaatacgggaaccgcgctcaaatccagcgtgttcctggtagatgtctcataggtgcggatcccgcgctcacagagaaccacattttcatttccctcagacataatatattctgcggcattcagccattcatctattgtagcagataaaccgcgttttagtaagatggggagggaagtttttccggcttcttttaaaagttcgaaattctgcatgttcctggctccgatctggagcatatccacatactgtacggcggactcgattgcatggccgctggtaacttcgcagataacggaaagaccggttgcctctctggcttccttcatatatttaagtccctctgtttcaaggccctggaaggagtaaggggaggttctcggcttgtaagcgccccgcgcagaaaggttgcgccggatttttttacggcaaaagccgtctccatcaactggctgctgctttcgatggcgcagggaccggccataacggttaaggtctttggcccaatctcggtattctgtactttgattacggacggctcggggtggaatttcttattggccagtttgtaggactctgtgaccgagacaaccttgtcaacgccgtccgtgatctcgatgttggaaccgtacagcctcgtcttatcgccgacaacgccgatgatggtcacctggtcgcctttggaaagatgagcagtcagccctttcgattcaattattccggttactctttttaccgcttcttcggaagcgtttggtttcattatgacaatcatgttctaatcccgctttcttgattaataattattatgagtaaggaggacgttcccgtccgctgactgtctccatcctcaactaacattattgcctattgtagtgcagaaaggaaaagttgtcaacgatttgttgcgttaaactgcaacagtttaacgtggggaaaacaaatggaggattaaaatacggaaaaaccccgggattttcaattctcttgtgcgaaattggcataaaatttgtataaaatgtgaattttacttgaaattttctctcttttcttgtacaatatcaacatggactaaaatttatctacgggaggaatttttatatgaacgtgtatgggacaaaacaaatccgtaatgtggttttattaggtcatggcggcgccggaaagacaaccgtggcggaggctctggccctggttacaggcgtaactaagagaatgggtaaggttccggaaggttccactatcagtgattatgataaagaagaaatcaagagacagttttctatttccacaaccctgattcctctggaatatgacggagaggacggcccgattaagattaacctcttagacactcccggttattttgattttgtcggagaggttgaagaagcggtcagcgtagctgatgctgcgattattgtcgtgaactgcaaggccggaattgaagtaggtacggagaaggcatgggaactctgcgaggagtacaatcttccgagaattatatttgtaacaaacatggacgatgatcaggccagcttccgtgagctgattctgaagctggagaagcgcttcggaagaaagatcgctccgttccaggttccgatccgtgagaatgaaaagttcgtaggttttgtcaatgtcgttaagatgaagggcagaagattcacaaatctgagtgattacgaggaatgcgagattcctgaatacacaaagaagaacctgggtattgtcagagacgctctgatcgaggcggttgccgagacgagcgaggaatatatggaacgctatttctcaggcgaagagtttactcaggaagagatttccgccgctctcagagagcatgttacggaaggcaatatcgtaccggtacagatgggctccggtatcaatgcacagggcttcagccatctgctccaggctattgacaagtatttcccgtcgcctgacaaatttgaatgcgtcggcgtggatgtttccacgggcgagcgttttacggcgaaatataatgacgatgtttcactttcggccagggtatttaagaccattgccgatccgttcatcggtaaatattcactgatgaagatttgtaccggcacattaaaaccggacagcgtgatttataacgttaataaagacgcggaggagaaggttcagaagatttacctgttaagaggcaaggatgttatcgaagtgcctgagttaaaggcaggagatatcggtgcggtaggcaaactgtccgttacacagaccggtgatacaatcgcagtccgcacggccccgatcgtttatcacaaaccgaaaatttccacaccgtatacatatatggcttattcagccaagacaaaaggcgacgaggataagatttccagcgcgcttgccagactgatggaggaagatctgacgctgaagaccgtcagtgacgtggagaaccgccagagcctgctctacggtatcggcgatcagcagctcgatatcgttgtaagcaaactgcttgccagatataaagtggatatcgttctcagcaaaccgaaatttgcattccgtgagactctcaggaagaaagtggaggctcagggtaaatataagaaacagtcaggcggacacggccagtacggcgatgtcaagatggagtttgaaccatcgggagacttagagaagccatatgtattcgaagagagggtatttggcggagctgttccgagaaactacttcccggccgttgagaagggaatccaggaatgtgtcctgaagggaccgcttgcaggttatcctgtggtaggtttaaaggctgttttggtggacggttcttaccatccggtggattcttcggagatggcgtttaagatggcggctactctggcattcaagaaggcattcatggatgcgaacccggttcttctggagccgattgcttctttaaaggtagtcgttccggataaatttaccggcgatgtaatgggagatctgaacaggagaagaggacgcgttctcggtatgaattccgatcaccatggcaaacagattatcgaagcggatattccgatgtcggaactgtttggatacaatacggatctccgttccatgacaggcggaatcggcgtctactcctacgagttcagccgctatgagcaggctccgggagatgtacagaagaaggaagtggaagcgagagccgccgaagccgagagagactgatagaattttgagatttccgatgttttttaaacagtaaatatagggatatgagtagaaaaacagggctgctgcaaagagatatctttgcagcagttactttttagcagtgaaatattttcaggtatgtcattcactgcctgcgggcgtgattggttgaaatttcagacaaaacgcggtgatgtccaacaaagtgtagtgacttttgtcggtaatgccatcttattctggtattttatgcgcaaaatgacgaaaattaaaataatgcttacaaaacacttaaaaatgtggtatgatttatatagtgtggtataagtatgccggaattacagaagcggaaaaagcaaattttcccgtattcaatagagcggtgaggggttcgcgaaacgtaacctttcatcgttttgtattgattggcggtgaaaaactcgcagagagtgctagagcgtaaacattggcagtttgttcagaattcaggagggataacatgaataaaggcgattacatggttcattggagcggcaaggtctgtatggtggaggacatggccgagatgaatttgacaggtacaaagagaatgtattttattctcacgccggtaagagataaggcagaaaagatctatgtccctattgaaaagacggagggaacccttcggccggtgctttcgagaaaagaagcagtctcacttgcgggaagaatcagggatattgaaccccttcagattaaagatgagaagcagcgcgcccaggaatataagacggcttactattcccaggattatttgaatctggtcagaattgcaaaagaactgtatcagaggaaagaaagcagagggagagaaggcaagaagctcccgtcgaaggatgcgcagatgatgctgctggtagaaaagacatttgaggaagagatggcggtggcccttggcgttgagaccagtgaggtgaaaaatatgctggaggcaggaagccggacataatttaatatacagcagattcggtgcgcaggcatcggaaaagcggcaggaaggagacagcgggagcggattaaagtatcccgctgtctcttttctgccgctttttaacgtcctcatcgtttgctgaaatacagggaattgtaagaaaattgcaaagattggaaaatgtttctattgtataataaggcaaaagcagaggttatcttaaagagaaccggcgggaagatgagtaaaggaaaaaggatgatatgcataggataacagacaggatgatattgaaggcgagcgtattgatcgtactgctgtgcctcattttcgggatttgttttagatacaggtacaggctggctgagccggtttttgtgcagcagaatacggcggtaacggcaatatttgatgacagtgaagcaaaaccggggtggtatgcagacgttacattttattatattacgggaagaggagatgacaggctggtacagcacattgatttttcgcagctccagccggcagggaataacgcaggggatgaggcatccctgaaggaatttacagagacgatagaatcaaaggggcagtatcttttgcacacgctgggaggaaagctgtttgtgccgtccggggagccgcttgaaaactacagagtggtgacggaagggaacgtgtattatacggacgggagcagtgccgtcacagaactgggcaatctgatctttgagccggattcccgggtaaacaccgttgctgaggtggtatcggtttcatccggctcagaaggaaagagcgagatggtggtgcggatgaaaagcgacgccgcactgaaggtgaaagaggtactgactccggagcgcacatccggttcctttcatatgagattaaatggtatagagctggcgccggggccggatttgggaaataaggagcttatgaggtttgagaagggcgatgtatttaaaatggacagccggtgggacggggatagccgtttcgacgatccgtcgggactgatttcaaccatcatgattctggaactggagggaaaggcgcggcagacgcttctttttgtccattccgtgcttcagccggcaggaggtaattttattaatatgtggaaatatctgaaccagagggagtgttttaaatgaatagcagaagcaaaaagatattttggggactgctgattgcgtcccttcatatcgatctgttcgggcttgtattgcttccggcctgttttggcttcgcaattttgtatttcggaatttatgatctggaaaagggggagcgccatttccgctgacccaaagacagatgaaattttatcatgctctggcggcggctcttgttctgctgtccggcattattgtatttacttcaattattgacattctgcccgattcggaggtatgggaggtgcttccctgtgtgcttgaatatatagtatgttttgtcctgatggaagtttatgcgggaagaaaaccttctctggcgggactgaagagggggtatgccgttgtaatgggactggcgctcatcggatactgggccagccttttcgtgggttcagccggctggcagattttcagttccgtaattatcctgatatgccgcgtgatggtgctgaccgctgcatacagtgacagaaaatatgaggcatcggagcctttggaggaaaaaagtcctttgataaactcttctgatatgagataatagagtcagtaggcagtatagaatttatgtgactatttcagactcatacggaggttacagcagatgaggatcattgattttaaggaaagcaaatgcatgcactgctataagtgtgttcgttactgcgatgtaaaggcagttatgatcaaagacggaagggcagaggtcatagaggacaagtgcgttctctgcggccactgccttcatgtctgtccgcagtcggccaagacgatggccagcgatctcgatacggtgaaatattatatcaggcaggggcaccgggtagtggtgtcactggcccggcttatatgggctttttgcaggaggggaccattggccagatccatgaggcgttcagaaagctgggattcttcgatgtcagggagacggctgagggagcggcggccgttacggcggaatatgcaaagcttttagaagacgggaagatggagaatattatcacaacctgctgcccgagcgtcaatgacttgattgaaatatactatccccggctggtcccatacatggcgccggtcgtatcccctatggtggctcatggaggatgctcaagaaggaatacggggaagatgtgaaggtcgtatttgtaggtccctgtattgccaagaagaaagagtccacggatcccaggaactttgacagcatcgatgcggtgctgaattttaatgatatcaggaagtggatggagtccgagcggatctcgatagaagactgcggagatgttccgtttgagcgcctggagccgcaggtgaaccagttatatcccgtcaccggaggcatcattcactccgttttatccacaaaggaacagaaggacgaatacaggaagcttcatatccacggaacgaaaaattgtattgaattctgcgacagcctgatggccggtgagataagcggcagctttatagaaatgaacatgtgtacaggcgcctgtatcaacggttcggctccgctcgacagaaccgtatccagattccgggtaaagatcgatatggaggaaaaggtttcaagggagcctgccgacagggtaaagcttcagaaaatgagcgagggagtggggcttggcaagcaatactccgatcactcaacgaatgatttaatgcctacggaggagcaaatccgggagatactggcaaagacgggaaaaaggacgccggaggaggagcttaactgtggagcctgcggttattccacctgccgggaaaaagcggtggcagtcttccagaaaaaggcggagattaacatgtgtattccctatatgcatgacagagcggagtctctggcaaatcttgtgatggatacttcgccgaatcttgtgatgattgtggacggggatatgaagattttagagtactccgcagtcggtgaaaaatattttggcaagtccagggccgaagcgatccagatgtacctgtttgagtttatcgatacagaagatttccagtgggtctatgcgacgcatcagagtatcaggggaaaaaaggtatcttatccggagtataacctgtcggcgctgataaatattgtatatgtggaaaagaaggatgtagttctggcgacaattatcgatatcacggaacaggaaagccaggccaggaagtattacgaaaagaagctgaacacagtggagctggcccatgaggtaatccgcaaacagatgacggtagcccaggagattgcgggacttctaggagagacggcggccgagacgaagatcacactgctggacctttgcgattcacttctggaagaaggcgaaaaagagcaggggacgggaagtggaaagagaaggcgcgggactgcttctgcggaaccgggttccgaagctgaaggcaggagatagaagatggaaattaaagtcgatatggcatataagagcctgaataagaatgaagaagagctgtgcggtgacaaggtggagattctgcacacggataattcccacattctgattctggccgacgggatgggaagcggcgtgaaagccaatatcctggcgacgatgacttccaaaatcctgggaacaatgtttttaaggggcattcctctggaggaatgcgttgagacgattgcggaaaccctccctgtctgccgcgtcaggcagatggcgtacgcgaccttcagcatccttcaggtctatgatgacgggaccgcctatctggtggagtttgacaatccgggctgtatttttatccgggacggcgaaattatgaagataccggaacagttccgcatgatcgacaacaggcgcatcaatgagtaccattttaaggtgaagctgggggatgcttttgtcctgattagcgatggcgccatcaatgcgggagtcggagagctgctcaatttcgggtggaactgggacagtgtggcaaaatacgcgcagagagagtataaaaagacaatatcggccatgcatctggccgccgcgatcagccaggcatgcgacgatctctaccagtaccggcccggggatgacacgacggtggccgtgctgcggattggggagaaaaaactggtcaatctgatgaccgggcctgcccagtgccaggaggatgatgagggtatggtaacagactttatggccgatgaaaatgcagtaaaggtggtctgcggcggaaccagcgccaatattgtagcgcgggtgctggaaaaagaaatcaatgtggcgtttaccggggagattgatccgaatataccgccgaccgccagtatcgaaggaatcgatcttgtgacggagggagtggtgacgatgaaccgtgtccttaagcttctggagcagtatacgagagacgatgagatagatgaggcattctttatagagctggataagccgaacggggcgtcgatgctggcaaaacttttgattgagcaatgtacggatttacatttgtttgtcggaaaagccgtgaatgcggcctatcagaatacggaactgccgtttcaattgggggtgcgccagaagctggttgatcagattgaggatgtgttgaaaagactcgggaagggagtttcggtgagatactattaaaataatttgggcggattatgattgtccaggatgatatgcttatttaatgaagctgcaaaaccgatggttatcaggcctgtcagtattgcagctttctcattttacaggaatgaaaattttaacttcgttgtccggagcgtcaaatgccagcaccgatgattttctatatattcgattgccctttctaaagggtgcaggacctgacccaaaataatctgaaacattaaaaggataatatcaaatggaagaacatgacatacagttgtcgtattgattgtgttattataatacaaggagcaatatggtgaattttcaagcgcactccagtgcaagatcatacaagaaaaacatatcagaatatgatataatgaaaagaaacaatgcgcacaggccacggtctttgatgtaagcaatggaaggggccaccgccggagtgcgccgactggaaaatatgataaataaaaacactgaattacaggcaaatttgggacagttgcatacgacggaattaggcgttatgagaatacggcggaacctttccttagacgtggaagacgtggtgggatggtgcacaacgaagattgcctccaacgctgccgttattacaagaaacggcaaaaactggtatgtaactattgataactgtattataacaatcaatgcgtacagctataccataattacggcccacagggtaaagaagaagtgttaagcgcccgtgtgcaaacggctgctggacccggctcaattttaacgttcggacatagacgggattgcctcacagcgcattttacagcgctgtggttttgttgaaatacggcgggggaaacaatatggtggagactttgaaaagatagaggggaactgttaatgacagcagaagaagtttttagtgcgttgtacgataaatatggcgtagactttaactggcacttgcttccattattacaggcaaatggaaactttgtcgaggaattgaagagagaaattgggaatgaccattttttgtatcataaaaaaatttgggcagtggcaaagtgcgattcaaatgatgatgtgctgtatgttaccggaaatgaattggggatagacacctattatatttttcatttgacttactcagcgcataattcagatggatttcctaaatatgaggagtttcctgatatatatgcaatgaaaaaatttattgaacaatcttttgtcgaaaattacatgtgaactaacacatcgaaaacggcagcaggctaaatggctgggagttaccattgttaagaatcggaaaatcaggatttataaggggaaaccgtcatgtatgacagaatgcttgataagcaaaacagaccggcttttgacgatatggccgcctactgtggaaaaagtatgaaattatttatccgtatcaatgaatggctgtcggaggtctgcgaaacgacacaggagattgtctttccctatggaaacaactacggatgggccgttgcccacaggaagaagaaaaagctgatctgtaatgtgtttgcggaaaatgacgctttcaccgttatggttcgtctttcgaatgaacaatttctttcattatatgatcggatgggggaagaaaccagaaagtgtatcgacaataaatacccctgtggtgacggaggatggcttcattaccgggtcaccggtgaggctcatttttgcgatatacaaaaaatgctggaagtgaaatgcgcattatgaatggcagaatgctgtttatagagaattggcaaattcgtggaaggggagcgatatggaacaatttgatgctctaatcaaaaaggacggtatttcataaaacaaagggaactatttacgtgaatggtatagtcaacgacatagcataccgcagtaataagctggagcccgtttctgtgattgcatttggctggccggacgaagaaaaagaattacctccccggcgggaaacggcaatggtgcattatgacagatggtaaggtttaccggcctgttatattagaaaggaatttaatttgaaatataataagatcatactattgaagaacaataaggaatgctgtttgagaaatggcagtgaaagcgacggaccggctgtattggataattttaatttaacgcattctcaaactgattatttgctttcctatccggatgaaaatacttttgattcgaagcaggagagtaaattcctgaaggaaaagtccgagagtgaaaacgagattgagataattgcagtggtcgataatatagtggctggaactgccgggcttgaagcgataggcacgaaatacaaggtgcggcatcgtgccgaatttggtattagtatcgccaaagagttttggggattgggaatcggatgggcattaataaatgcctgtatcgaatgcgcggggaatgctggatatacgcagcttgaactcagtgtggttgctgaaaatacaagggccatatcgatgtatgaaagggcaggctttgttgaattcggcaggaatcccaaaggctttaattcccgtaccgcaggatttcaggaactgatttatatgagaagggaattgtaaggcataagatgagagagattattgatttcattgaagcaaatgtgaatggcaggacgctgtttacaaaggaattggtttatgaacttgagaacggcgggttacagggcgtatactcggatcagatatcttcggttaagtagtcttccgtatagattgaagtaaataaagagctgtctgtggcactggtatattgatataccggtgcttttttggctctttgtcaatagttggggtgggatttgttaaaatcccgccccaattctatgaaaagggccctttttatgtttagttccaggttttactgattttgggcatgccaaataagcctccgcattaccgacctttttatcctatgatgtacagtgaagtatccgggttcggaaccgtttgaaattccggattccgtagctgctccgttttaatacctttatcttgttgttaaatccttctgtgggaccatttgtcagcccgtatttaaaggcattcaggatttcttttcgccaggccctgtaggtcttagcacaggcctcaaattccttgatcccacagctctgtgcattcgcaatccagtcatcaaattccctctgctgctgacgatacgcttccatctggcagatatcatagaaccactctttcatgcggtgtgccagacgcagctcctcgctatagtgaagcattaaatcacaggcctgtttgttctcatccttcagctttttgtagcgggtcagaatgagtttccggctgcgtttataatacttacgcagagaaaccggcatggagcgctgcagccgtttgcgtacattttcaattgcccatgtcacctgccggatgaaatgatatttatccacgatgattgtagcgtttggaaagaaggtttgtgcaagttcggtgtaggggcgccacatatcgcagacgaagaactttaccttcaggcgttctttcctgggaatgttccgccaataatcagccagatggctttgggtccgatccgggagaatgtcgaggatccggcgctttttcggatcaaccagaatgcactgatatttaccggtagaagcattgcctttgaattcgtcaatggaaagcgcttgtggaagctggtcaggcggaggatagcaaatcgtgtccagaaggcggcagaccgtctggacggaaacaccggtaagctctgcgatctgttttaaggaaaaggtctgccggagcagggagacaatgtaaaatgccagcctgcgggtcctgcggtggtagctggggaggaacgaatagggttccgtgaaccgtttgcggcagtatgggcagaggtaacggcgtttgcgaaggagcaggattacttgttttcccagtaagggaatgtcctggacttcttgtaaacggtaatcatgaatccgttttgttttagccccacagcagggacaagtctgttctaccggttgggactggatgaaaattttaatgaaagagtctgcctgaaccacttttttaatagaaacaccttccaagttaaggaaagccttggtataattagggtacatctataaggggtcacctccataacattaaactttggtcgggataatgcgtttaggaggcttcttatagatgtattttattacaacgaaaagaatgttggaagtgtgcttttcagcacaccccaacattcagtatagaaccgcttttttttgatgacgggaacctgtgcgcggagcgtacaggttatcgttattttaacaggaaaactttcctgttaaataaaaaccgctccgcggaggagcacgcgggcgggattctttccgaggcatggcggcagatgaaatttccgataattttacaattatttacgtaaatttcgataaaacttaacctttttctgatagttagctcaatagtgcagtgttattgtaagaacgttagaaaaaatgaatgagaaagaacaggaagtaaaggagacagagcagaatgtcacaaattgaactgcggaatgtgaacaagacttatggaaaaaacaattgtgtgattgataatttgaacctgcggattcccgacggcagcttcacggttatggtaggccccagcggctgcggaaaatctactactctgcggatgatagccgggttagagagcttaagctccggtgatttgtatatcgacggaatccgggtcaatgacatggaaccgggagagcgtgatattgccatggtattccagaactatgcgctctatccgacgatgagcgtgcggggaaatatcgagttcggcctaattaatgcgaaagtgccgaaggaggagagagacaggcgaatcagggaaatttgcgagattgtaggcttgtcgccttatctggaacgcagacccggagaactgtccggagggcagcgccagagagtggcactggcacgggcaatggtaaaacagccgaaggtgttcctgatggacgagccgctttccaacttagatgccaagctgcgaaaccagatgaggacagagctgattgaattacataaacaactgggaaccacctttgtttatgtaacccatgaccagacggaagccatgtctatggcaactgatattgtgctgatgaaccagggagaaattaagcaggtggattcaccggagaaaatctataacgatccggataacctttttgcggcacaatttatcggcaacccgacgatgaatctccttaaaagagaggaaatggatccgcttctcaggcttcctgtagacattgaaacgattggtttcaggccgtccaaggtccggcttctggagacaggggatacggtcagcgaaggggaactggttacttcaggtccgattcttacgagggaattgatgggcagtgagatcatataccggattcaggcgccctttggagtaattacatttaaaacattcaatgaaaaacagctcccggaggatcagacggtccgggtagcagttatgaaaaagagtatgtttttctttgataaagccggaaggagggtgcgggtttgaaaacagtaaagccttatctgcttattgctccggcgctggttcttctgtgtgttttttgtatttatccaatcttcaatatgattggcttaagcctttatgagtgggatatgatctcgccgtttaaaaagtttgtaggcctgcaaaattttgtaaagctggctgccgacaaacaattttttcagacgctccttaatacggtcatctatgtggcctgcaccgtcggcttcggcgttggtttcggactgattctggctgtcttcctggccaaaaagacgagactgaacgggctgctgcagagcgtggcgttttcaccgtatatcgtgtcactggcctcgattgcgctgttatggatgtggctgatgaacaatgactttggatttttaaatgccctgctggccgtattcggcattccggccatagattggctgggcagcccgaaatttgccctgatgtctcttatcattatcaatgtctggaaaagcgtcggatataatgcgctgatcctggtatcggcgctgcagggaatcccgccgcatctttatgaggctgccaggctggacagggccaatacatggagaacgttcagccggattacgtttccgatgatatcgccaaccgtattctttttagccctggtggacgtaatcgcagcttttaaagtatttgaaacaattcagatcattacccagggcggccctcagaattcaacgaatacactggtgttctcactctatgaatacggatttcagttttacaaagtgggatatgcggcggcgattggtgttgtattgtttttcattgtgctgctgtttacgatactttactttgcggtgctgtcaaaacgtgtccattaccaatagagagggaggagtaaaccatgattgcagtagataaaaaaaagcctctgattcctggttcaggaggcatatcaaataatgtgcgggaaaatgcccggacgcggatatacaggaaggcggcggcgcgcagtgcggcgaagctggcaagaaatctggcaagcgccgttttgctgctgatatttttctttcccttttactggatgatcatcacatcctttaagtcattgggagagacaatggtgtttccgccgtccctgctcccgaagcagttccatttttccaattatgcaggagcattcagtgcatttccttttatcaggttcctggttaattcctgcattgtcacagcagcggtcctggcgctgcagatgatgaccgtgataccggccgcctatgcattttcccagtaccaatttaagggaaaaggatttttattcggcctgaccttagctacgatgatggtgccggcgcagctgatatttctgccgctgttcgtcctgttttctaaaatggggcttattaacagctatgcttcgctgattcttccattcggaaccagtgcattcggcatattcatgctccggcagacctttaaccagatgccgaaagagcttgtggaggcagccagactggatcgggcaggagagtggaaaatagtcacacggctctttcttccgatggcgcggccgactcttgtgacaatggcgctcctgacttttatcaacacctggaatgattacttctggccgcttgtcatgacaaccaatgacacggtcagaacgctgccggtgggagtcgcctccctgcgcaacatagagagcggcattaactataacatcctgatggccagcaatgtaatgctcaccataccgattgtagccgtctatctgctggcccataaacagattatcaaagcattcacttatcttggagataaatagtccttctccggatatgggaaatataaagtctataaagacacaaacgattatgagaagacaaaaggagaacatcgacatgaaaaagagaactacaacctgcatcctggccgcaatgatggccttgtccgcctgcttatccggctgctcgaccggtacttccggttcagcttctgcgtcatccgggacccagggcacgtcatcgggagaaagttcagatatcatacagttgacttactggtattcctggcaggataaaattgctgaaaacaatgtggagcgcatacaggaatttaacgagacggtcggaaaagagaatgggattcaggtcactgccgagtatcagggtacatacgatgatctgcattccaagttaaagagcgcatttgtggccaacgaggagccggatgtctgcgtaatggagatagccagcatcaaaccgtttgccgacggaggcattatacagccgattcaggagatggtggctcaggaggacgtggatgatttctacccgggcctgatggagaactgttatgtggacggagtcctttatggagtcccctatttaagaagcacgcctgtcctgtactataataaaacgctttttgaaaaggcgggactggcttcggagaaagggccgtcagactggaaggaactggcctccatgtcaaaacagcttgccgatataggagtgagcggatatgggtttgtatccgatatctggatttatgaagctttccttcgatgcaatagcggcgacacggtgaatgaagactggacccgggccgtattcaattcgcagcagggcgtggagatgacacagtttctgcgggacggcctgcgggagaacaattttaaatattacagcggaaataatgcctccgacgccattaaaacagatgaggttaaccagaaagtggcgatgtgggtcgcttcaactgcaaatctgtctaataaccttcagcttgcctccgataacgggtatgagatcggcacggcttttataccgaaaaacacccagaataaagtaccgaccggaggctgcaacctggttatgaccagccgcctggagggaaagaagaaggaagctgccgcaatgctgattaatttcatgtcaagcaaagacagtgcggtgaaaaaccatattaaaacggggtatctgccgacaaggaagagcatcagcagcgatgagcgcctggtggaattatatgaaaaaacaccacagtacaaagttgcccttgaccagctccaatacggaagcggaaggccgatggcacaggcgtatacggagatgacaaaaacgtatcaggaaggaatggataaaatcatgacaaccgatacggatatccaggaagcgcttgacgagtgtgcggcggcctgcgactcccttttaaaataaaacagatacaggaatgcaggcacaagacccgattgagaaacaactaaaacagaagagcagacagtttagacagcgaggagagaaaaaatgtccagattagtagtaatgtgtgttgacgctttattcacgacagacttggaggatgcagccaggatggaaggctttgccgccatcatggatcatgcgggaatctataaaaatatcgaatgcgtatatccaactctgacttacccgtgccatgcaacgatcatgtcaggatgctggccggaccgccacggaatctgccataatgaaaaactggatccggggaccaataaccgagaatggtactggaactataaggatttgacggtgaaaaccatttttgattatgcaaaggagaataacctgacgaccgcggcatttgaatggccggtcacagccggagcagatatagactacatgattccggaaatgtggacttacgatcatacgccggatatgagggaagtgcttcttccaaacagttctccggccatgaaggaaatttatgaaaagaactgccatatcatgaactggaaggaaaatccgcggtttgacagcttccaggtacagtgtgcagtcgatattattcaccggtataaaccggatgttctctttatgcaccagtcccatctagaccacacccgccatgtatacggactgcatgcaccggaggtacaggaggcgctgcggctccacgacggatggatcaggcaggtgattgaggcactgaaagaggaagagctgtttgaagacacgacctttatcatattgggtgatcacggtcatcttcaggtcgattacaacatctgccctaatgtgcttttggcaagagaaggtatcgtgaggacagacggcgccggcaatataagggaatgggacgcgtatatccagtcctgcggaatcagcgcccaggtctacattaaaaagcaggaggcggagggaattgtgcttcgtctgctgggagatttaaaagatttgggatatgtgagggatattttcacgaaagaagaggtgaaagaaaagttccatttagacggagaattttcttacatgatcgaggcggcgccgaattatgcctttggcaatgcggcatgcggagatctgctggcagggacggatacgacggactataaatattctgtggctacccatgggcacttaccggccagaggcgataagccatgtttcatcgtccgcggagccggtgttcccgaaggcgtatttgaaggagccagattggtggacgaggcgcctaccatgatgaaaatccttggactttcctatggggaaggagaaatggacggagcgccgctgttttaaagggatacacaggtcaccgccgtcaataagggaagcagcaccggaggaaagcttaaacctccggtgctgcttcttttatgaatttatatttatgcctctaacagctggccgaatcaattacaaatcatagtacattttaaattcagccgggttcgggatctgctccatttcaagcagctctttgcgttttcgttccagccaaatctcgattaaccgctccgggaatacgcctccggccgtcagatactcgtgatccgcctcaagagcgtccagcgcttctccgagtgatttcggcaggcctttgattttctttttctcctcctcggttaaatgatagagattgaaatcataaggcccccatccgttctcgtgaggatcgatcttattcctgattccgtccagtccggccatcaggagggcggcataggcataatatggattagcggtgccgtcaggattacggatctcgaaccgctttgtatccggtgattttgcataagccggaatacggatgacggcgcttcggttggaggtggcatagccaatcgtcacaggagcctcatagcccggcacaagacgtttgaatgagttggtggacggattggtaaaagcgcagagcgaagcgatatgcttcagcaggccgcccataaaatagtgggccgtctcactgagtccggagtaaccgttctcatcgtagaaaacaggctggccgtctttcttcagcagcatatgtacatgaaggccgttgccggcttccttgtaaatcggcttcggcataaaggtggctgtctttcctgcttttgcagccgtgtttttaatcacatatttgataaccatggtattgtcggccatcgagacaagatcaccgagctccacctcaatctccatctgtccgggaccgccaacttcatggtggtgatatttcacctttaccccccagtcttccagcgccagacacatctggttcctcaaatcaaaaccgatatcctgcggggcagcagcatggtagccgcctttgtatccgacctcataaccattatttgcgatatcgtcccggccgctgttccattctgcctgacgtgtatccagatgataggcgcttttctgcggagtaacctggtaacttacgtgatccaggagataaaattcaaattccggcccgatcagcatctcatcggcaactccctgttccttcatatattcaactgatttcttgcatacatttttaggatactggtcaaacggggtattgctgtctttaccgattacacatacatcgccgctcattgtcagcgtaggaatttctgcaaagggatctacggccgccgtgtccggatccggtataaataccatatcgcttttttcaacaggagcgaagccgtagttggaaccgtcaaatccgatgccataagtaaagatatcctcggtaaaacgtgcaacagggattgttacatgatgccatcgtccgttgatatcaatcattttgaaatcaatcatcttaatctggtgctcttcgcacatgttacgtacatcaatacttgttttcataaagatatctcctttgctgattgtggtaaatggttaaatatatataaatattatataatttattgtgcaaaatgtataatacctattgattataacattatagtttgtaggaataaccgatggaagggggaacgagaagaaagcataaataaacgaccgcacaatcatgcggtcgtttatcaggtactgtttgcaccatgccaaaaggcggcatactgtaaacaataacacactttgcgatgcacggaaactgcaaaaaaacgcagtttcgcgctgtataatccggattttcgtgcagaaatcgcacgtttcttttcacggattaatttccatttatccgtctttttacatagctggtatgcagcagatgatgcgctttttcgcttccgggttctcccaggaaggaggcatataattcttttatcgccggattctcatgggattttcggattgtattggctttgtcggaattatacagcacctgggcgcgcaggccgcggatatcgacggtatcccgcacgtagccgggctgctgaggctggccgcctccgtttacacagccgccggggcatcccatgatctcgatgaagtggtaggatgcctcgccggattttaccttgtttaaaagttctctggcattattaaggcctgatgcaacagctacctttacatccattccggccacattgtaggtggcctccttgatacccgcagtaccgcggacttccgtgaaatcgagagccttcagctcctcgccggtcaaagtttccacggctgtacggagagccgcctccattacgccgcctgtagcgccgaagatggtggctgcgcctgtactgagtcccagaggggaatcataggatgcatccgggagcgcggtaaatttgattccggctttccggatcattctggccagttccctggtcgtcaaagcgatatctacatcaggtacgccgttggccgcctgatggtcgcgtcccacctcgaatttcttcgcggtacacggcatgatgctgaccgacacgatgtccttcgggtcaattccggccttctgggcgtagtaggatttggcaatcgcaccaaacatctgctgcggagacttacacgatgacaggttcttagtcatatcagggaagtaatgttcacagtatttaatccatcccggggaacaggaggtgatcaggggaagaacgcctccgttttgtacgcggtcgagaaattcatgggcctcctccataatggtgaggtcagcgctgaaatccgtatcaaatactttgtcaaagccaagcatcttaagcgcggataccatctttccctccacgcctgtgccaatcggatacccgaattcttcgccgagagcggcgcgtaccgccggggctgtctgcacaatcacgtgtttggcgggatccgcgatggctgcaaacaccttgtctgtgaaatccttttcctggagagctccggtcggacatacggcgatacactggccgcaggatacgcagcttgtctcgcccagtcccatgttgaatgcggaaccgatattcgtaacaaaacctcggtcattggcgccgattacgcctacaccctgaatactttcgcaaactgccacacagcggcggcacagaatgcatttgctgttgtcgcggagcatatgggcagcgctgtcgtcaattaccgacggcgttttttctccgtcatataaaccttcgtcgtccacacccagctcgcggcagagggcctgcagctcacagttggcgctgcgcacgcaggataaacattttctttcgtgattggagaggagcagctgtaatgtctttttcctcgaggccaatacctgcggggtgttggtccagacttccatgccctcattaatcgggtatacgcaggaggcaaccagggttctggctcccttcacctctacaacgcagatacggcatgcgccgatttcattgatttcctttaagaaacacagggtaggaatctcaatgcctgccaggcgggctgccgtaaggatcgtggagcctgccggagcggtaacggtcctgccattgattttaattgtaatatccgccatttgaatcttcctcctttatttcttgtagattgcgccgaaatggcatttctccatacatgcgccgcacttgatacatttctcattatcaatgatatgcgggtttttaacggttccgataatggcgcctgccggacagttctttgcacagagcgtacagccgcggcatttttcacggtcgatgacgtaggagaggagtgccttacatacgcctgccgggcagcgtttctctttgatatgtgcttcgtattcgtcgcggaagaaatgcagggtggagagcaccggattcggagctgtctgtcccaggccgcagagagagttggtcttaacgtaatagcacagctcttccagcttatcgatatcctccattgtggcctgtcccttagtaatctttgtgaggatttccagcatacgtttcgtgccgatacggcagggcgtacactttccgcaggactcctccaccgtaaattccaggaagaatttggcgatgtctaccatacagtcgtcttcatcgaggacaatcaggccgccggagcccatcatagagccgatggagatcaggttgtcatagtcgatggggatatcaaaatgctctgccgggatacagccgccggaaggcccgccggtttgtgccgccttgaacttcttgccgcccgggatcccgccgccgatctcctccacgatttcacgcagagtcgttcccatcggaacctcgactagtcctgtattatgtattttgcctcccagagcgaatacctttgtgccttttgatttttccgtgcccatggcgttaaaccattccgggccgtttaagattatctgcgggatattggcaagtgtttcaacattattgaggatcgatggtttcccaaacagtcctttctgtgccgggaacggagggcgcggtcttggctcgccccgttttccctcgatggaggtcatgagagccgtctcctcaccacagacaaaagctccggcgccgaggcgcagatcgatgtcaaatgaaaacccggttccgaagatatccttgcctaaaagctccatttcacgcgcctgttcaatggcaatcttaagtctctgcacggcgataggatactctgcgcggacatagataaagccctggctggcgccgatcgcgtagcctgcgatagccattgcctccagtacggcatggggatcgccttccagtacggaacggtccatgaatgcgccggggtctccttcgtcggcattgcaacagacatatttctggtcggcgtcgtttcctttggccagcttccatttaaggcctgtcgggaagcctgcgccgccgcgccctctaaggccgctgtccagaagcgtctgaatgacttcatcaggcgtcatctcggtcagtaccttgccaagagcctggtaaccgcctgttccgatatactcctcgataacctcagggttgatgacaccacagtttctgagtgcaattctgtgctgctttttatagaaatcggtatccgccagagctttgataccggccggtgtgactgtctcgctgtagaggagcctggtgacaatacggccctttaataagtgttcggagacgatttccgggatatcctcattctttaccatggcatagaaggtggcatccgggtaaataatcatgatcggaccaagcgcacagaggccatgacatcctgtctggacaacactgacctcctccgaaaggccgtttttatcgatttcagctttcaaggtttccataatctgcaggctgccggaagaagtacagccggttcctccgcagactaaaacgtgtgaacgatacatttggcttcctcctgtttatttgatatctgctgaatttaatgtgtatttttctaccgggtggccgccgattaaatgccgttccacaacctcagccgctttttccggattcattttaatataagttactttctctttgcccggctccatcacctcgacaatgggctcatactggcagagaccgatacatccggtctgggttacgataactttgccggtcagtcccttctcctgaaccagattggagagggtggtgagtacaggtcttgctccgctggcaatgccgcaggtggccattccgacaacaacacgggtggctccggtgccgctttcgcgcaagttaacctggttctgcatcctttcacggattgcttttaactcttcaaggcttttcatagattttcctccgttctgcatggacgcctagtaccaggcgccgccgtcagtttcaagtttgttttcggtcagatactccataatataggtagaaatctccggtgaatcaaagggaagatcccgagaatctcccggaactgtctggtgtcgagggtaaatgactttttgttatagcggtaggtgtaaacaaaatcagtatccggatgatagacaatcagagtatggatcgtcgaactgatatcgccgagaggcatccggtcaatatgtgataaaacgaacgtggccgtcacgtcagtccctttgcccggaacagaggcgatggtaaaacttccgccggcgctctccgccgcatatttgaagaagggaacgccgagtcccaccttgcgggtcgtcctgctggtgaaaaaaggatccgttacctgctccacctgttctttcgtcattccgcatccgtcgtcgcagattgagatggtcagacggtcggatgaaaaatcggcatccacggtaatacggaccagtccggcgccggcccttgtggaattttcggccacatccagaatattcagtgataattccgtcatcatatttttatttcactttccggttttatatcccgctattcatattttgcaagaattgtgggcacatcgtctacggtcagtctgccgtaaacttcatcattaatcatcatgacaggggccaatccgcaggctccgacacagcggcaggaatccagtgagaatttaccgtcgggcgtacactcgccgttggtgatgccaagcagttcttcgagtttcttgaaaatatcaccggaaccttttacatagcaggcggtgccgagacagacagaaatccggtactggcctttcggctgcagggaaaactgtgaatagaatgtggcgactccatagattttttcaagagggatgccggtttcatcggaaatcatggtctggacttcgatgggaagataaccaaaaatctcctgtgcgtgctgaagaatcggcatcagggctccggctgtatcttttaattcgctgataaccctctttaaatcagcctcctgctctgcggtgcaggtaaagcatacgccttcttttttctgagacatgttttaacctcctcataaatactgaacttatgtaatagtttgctatattagcctgaatagttacagtttatcatgctattgcagaaaaatccacaatatttttgttgataattcccatttacgatgatatcctaaagacagacatatgttaaaataagacaattttgcaggaggatgaggaggaattattatgatgaccgtagaagacgtacgcagggtgctgggagcgcgggtcctcgtaggggagcagtacctggatcgggaagtcagaactgcctgcggcgccgatatgatgagtgatgttctggccttttcaaaggatcattccattcttttgacagggctgtgcaacccgcaggtaatcaggacggccgagatgcttgatattgtctgtgtcatctttgtccggggtaagaaaccggatcagaagatcctggacatggccagagagaccggacttgttatcatggagacgggacacaggatgttttctgcctgcggcatgctttatgaagcaggcctgcggggaggtgcaatctgatggatgatgtgattacactgcagtacaaggtttctcccgatgattttacaagggcgggggaagccagcagcgacgtaaagaataaattaaaacagcttgggattagtcccacagcgattagaaaggtttcgattgccatgtacgagggagagattaatatggtcatccatgccagaggcggggaaatcacggtggacgtatcaccggagaccataaagatggttctggccgacgtggggccgggtatccctgatatcgaactcgcaatgaaagaaggatattccaccgcgcctgacgagatcaggagcctgggctttggagccggcatggggctttccaatatgaaaaaatattctgattatatggatatccagacagagctgggagttggaacgacgataacgatgattgtcaatgttgcataaaacagtctgtccgggtgaggagggaaggctatggataaattttaccattccgttcgtctggacccggagctttgcaagggatgcattaattgcatcaagcgatgccccacccaggcaattcgggtgagaaacagaaaggcgcagataaacagcaagttttgtatcgactgcggggaatgcattcgggtatgtccgcatcatgcgaagctggcactctacgatccgctggattcattacagcattatgattacacggtagcgcttccggcgccgtcactgtacagccagtttaacaatatggatgatgtgaatatcgtgctgaacggcctgattctgatgggatttgacgatgtctttgaggtgagcgccgctgccgagatggtttcggaggccaccagggaatacatagcggccaactactcgggaacgccgtttatcagtacggcctgtccgtcggtagtgcgcctgatccgggtgaagtttcctaatttaatatcgaatctgcttccgttaaaaccgccgatcgaggtggcggcccagatggccgtgaaaaaggcgatggaacagacgggactgcctagggagaagataggaatcttctttatttcaccgtgcccgtcgaaagtaacctatgtcaagtccccgcttgggaccgacagaagcgaggtggaccgggtacttgcgattaaggatgtatatccgcagctgatatcctatatgcagaccgtggatcccaaggcgcccgacatgtcggaatcgggcaaaatcggggttggctggggccgcagaagcggcgaggccggaggcctgtttacggagagctatctggcggccgacggaattgagaacgtcatccgtgtgctggaggatatggaggatcagaaattttccaatctgaaattcgttgagttaaacgcctgcaacgggggctgcgtcggaggcgtgctgacggttgagaacccttacgttgcggaggtaaagctaaaatggctccacaaatatatgccggtttccaagagccatctggacgaagaggccaggggctgtgtaaactggacggaacctgtggaatttgaacctgtattcaatctggggaacacgctgacagagagtttttccagattcaaccaggtggagcggatctgtaaaaagctgccgggcttagactgcggctcctgcggggcgccgacctgtaaagcgcttgcagaggacatcgtgcgcggcgaggcggatgagaaggactgcatctattacctgagggaaaatctgcacaaactgacggaggaagtgacgatcatggcggactatctgatagacggtgagaatttcggtgatgaggccgtctatgtgctgcgtgagtgcgtacataaaattgccgatgagatgtcacggcttgagaagaataccaggaggaccggggatgaccttaaacaatctgattgagaagctgacggccggagggcagttcaaaatcttgaataaggggacggacgtggaacgcgaagtgacgggaacctattgctgtgatctcctgagcattgcgatgagccgcgcgccggaggggtgcgcctgggtgacggtgatgggaaatatcaacactctggccgtggccgccctgacagatgccgcctgcattattctggcggagggtgtcacccttgacgaaccggccgcacaaaaggcgggggtgcaggatataacagtgctgcgcacagaacagcccgtattcgagagcgctttggagatacaccgggctctccagacagaggagtctgcaaaagactgaagaaaagaactgccgcggacggagggagaaggttaaatgataaatctgttttatgatctgcatatccattcctgtctgtccccctgcggcagtgacgatatgacgccgtataacatcgccggaatggctgccttaaaggggctggacgtgatagccgttacggatcataattcctgtaagaactgtccggccgtgctggctgcggcaaaggaatacggaatccttgcggttcccggaatggagattaacacatccgaggaggtacacgccgtatgcctgtttaaatccctggaaaaggcgatggagtttgatgcatatgtctatggacggcttttgccggtgaaaaacagggaggatatattcggaaagcaggaaatttatgattgcagtgatcagatctgcggccatgtggagaaccttcttatcagcagtaccgatatctccttcagcggtttatgggaactggtcaggacgtatgacggagtcatgtttcccgcccatatagacaaggcatcgaacagcctgatttataatcttggctttattccggaggacagcctgtttcgtacggcggagattgcggatatgaaacaataccatgctctgaaaaagagcaatccctatctggagcattgcaggattatcagcgattcggacgcccattatctggaggacattcatgaaccgcggctgtcaatagcagtggaggagagaacggccgctgcggtggtggaggcgctgcttgccggtatttaaaggaggaaacgtatgggaaaggcgtctgccgcccgaaagaggctttatatcattgtatcagccattctgtttagcctgacgacaccggttccggcgtcggcacagggagcggaaaataaccaagaggaaagctggaatattgccgtgttcggtgttcactcaccgactgaagcgaaaaaagaagagagcctggaatttgccgcagtagtggaaattgacagagagagcctggaacttaaaacggaatatataccggtgagagacggtgcatatgatgtacagaacaaggagagcggctatccggatctgggaatacgctatgacgattatgtagcttttaactggaaagacctggtggatgcaattaatatactgggaggagtggaaaccgtgatcagtgatgaggaatatgtctatatcaatgcctatgtaacccagaccgtagcggaaaccgggatagcgtccacccggatcagcaaggcggggttaaggtatatcgacggcgttcaggctgtggcttacagccgcatgaaattatcggaaaatgacgcagagcaggtgaaaaggcagggaaaaatcctgtcactgacatggaacagactgacgcatacagatatccggtctctgtatcgttttgtccgcaatatcctgcccggaattaagaccagccttgatggggatgaactgacgtatctgtataaaaacggcagagagtggggactggactgagaataaattttgaaactacttacaatacattagccgtagagtaaagtctacggctttttcttttgcataggaaaggagaaaaaaatgaatagcagttttataacatctttgagaaaaccccctatctacactaaatcaatggttgagttttggaatgatgaatatatctcagaacaaatgctcaaagcgcacttagaccccgaatttgacggggcaagtagaaaattggacgttattgaaaaatctgttgcttgaataacagaaataaccccatattatttgtggaatacatatttctcaaaagaaacattaatacaagaagccgaaagcattggctttaaaatatgtgggctgttttgtgatgttgcaggacgtatttatcagcctgaaagtgatacaatcgcagtaattttggaaaaataacctttagggggcagatcgtcattggtgaacctttaacagaattcaaatggacgattccccggactatattaaaagtgcagaggaaaaaggatttgaagtgaacggcgaatcatcagcaatacaatcgtgatggtgattgccgtcttgacaggtgttgaagttatgatggaggatgcctcttgcaacagttcagccatgatgtattccgcgaggtgttttcgctgctttttgcgaaaatcccgagttatgtggagcgtaacggcgcccagactggttgagggttgacatccgccggtgattatgataaattaatcattagcataaatgcagagaagaggaatagtaggctgaaagtcatatcagagagccgccggagggtgcgaggcggttatgaatctgtcagttgaactcgccttggagcagcctgttgaagagaagaccggatgtatttttgaaagtatatctgttcttgtgtaggcagagccggaatcccccgttatgggagctgaaagagcataccgaacgtctcatgccctcatccggggataagagcatacacggtatgaaatagagtggtaccgcgcagtatagaatatatgcctgcgtctctatggaaacatatagaggcgcaggctttttaatttatcggaaaatgcgatttcctgcgctcttgatattttatgggaaattaaatcaattcaggaggaagaagatgtcacagtacaatcataccgccattgagaagaaatggcgcagcaattgggaaaagaacccgatcaatgtaaatgacggaaaaaaggagaaatactattgtcttgatatgttcccttatccgtcgggaagcggacttcatgtgggacactggagaggatatgtcatctcagacgtatggagccgttaccagttattaaaaggtaaatacgtgattcatccgatgggctgggatgcattcggccttccggcggaaaactatgcgattaagatgggcgtccatccggcgatctccacagcagaaaatgtgaagaatatcaaacgtcagattggcgagattgcggcaatctacgactgggatatggaggttaacaccacggatcccggcttctataaatggacccagtggattttcgtccagatgtttaaaaagggactggcctatgagaaggaatttccaattaactggtgtccgtcctgtaaaaccggtcttgccaatgaggaagtggttaacggctgctgtgagcgctgcggaaccacggttaccaagaagaatctccgccagtggatgcttaagattacggcttatgcggagcgccttttaaatgatttagacaaactggactggccggagaaggttaaaaagatgcagaccgactggatcggaaaatcctacggtgcggaagtagacttcccggttgaaggaagagacgaaaagattacggtatatacgacaaggcctgatacgctttacggagccaccttcatggtgctggcgccggagcacagcctggcaaagagcctggcaacggatgagaccagggaagcagtggagaaatatatcttcgacgcgtccatgaagtccaatgtggatcgtcttcaggataaggagaagacaggcgtctttacaggctcctatgccgtcaatccgttaaacggggctaagacaccgatctggctctccgactatgtactggccgactatggtacgggcgcaatcatgtgcgtaccggctcacgatgaccgtgactttgaatttgctaaaaaattcaacattccgattatccaggtaatcgccaaggatggaaaagaaatcgaggatatgacggaggcttacactgaggccagcggaatcatgattaattccggcgagtggaacggaatggagtcctccgtactcaagcaggaagctccggctatgattgaggagcgcggcctgggcaagaagacggtgaattataagctgcgtgactgggtattctcccgccagcgttactggggcgagccgatcccgatcatccactgtccgaactgcggcaatgtgccggttccggaagaccagcttcctctggaacttccgaaagtggagagctaccagccgaccggtacgggtgaatcaccgctggcaggtattgacgagtgggttaacacaacatgtccgtgctgcggcgctccggctaagagagagacgaatacgatgccccagtgggccggttcttcctggtatttcctccgctatgtggacagcaagaataatgaagaactcgtttccagggagaaagcagataaatatctgccggttgatatgtatatcggcggcgtagagcatgcggtgcttcaccttctttactcccgtttctatacgaaatttttgtgtgacattggtgccattgattttgacgagccgttcaagaagctgtttaatcagggtatgattaccggcaaaaacggcatcaagatgagcaagtccaagggcaatgtggtttcaccggatgatctggtacgcgattacggctgtgattccctgcgtctttacgagttattcgtgggaccgccggaactggatgcagagtgggacgacagggggatcgagggcgtatcccgtttcctgaaccgtttctacaatctggttatggataataaggacaaagaggtcgaggcaacaaaggaaatgattaagatccgccataagctggtgttcgatatcgaacagagatttgagcagttcagcctgaatacggttatttccggatttatggagtataacaataagctgatcgatctggctaaaaaagaaggcggaatagacagggagacgctgagaacctttacggttctgttagctccgtttgcacctcatctcggtgaagagctgtggcaggcgctgggcggcacggacagtgtattccatgccgagtggccggaatgtgatccggagaagatgaaggacgatgagaaagagatagccgttcagatcaacggcaagacgagagccgttgtaacacttcctgccgatgtgtcgaaagaggacgccattgcagccggtaaagaggcggtgaaggataagctgaccgggaatgtggtgaaagagatttacgttccgggcagaattgtcaatattgttatgaaataacaaccatatagaaaagtaaaagagcattgcttccggcatgaaattaaattgattttgtgccgggagaggctctctttttttgcaattcaacgtgaaatcgagattttttactgaatctatgctaaaatacgggagaaagggcaatggagaagctgccgtggcgaaaacgattcgccaatgaaccggcccggtgagaaagccggcaattgcaagaaaatcgtaattggaaaataatagcgctttgtgctatgattataaaaaatgaagaaacaggaaaggattgacagaacatggggcatatcacatcaaaagatgcctacaaaagcctggaggagcggatcaactggtttacccagggcgctccggcatcagatacgttatataaaatactacaggtgcttttcaccgagaaagaggcaaaggtcatggccatgcttccggtgaggccatttactttaaagaaagcggcgtatatctggaatacctccgaggcaaaagcggagaaggtactcgatcacctctgtgaaaaagcgctgctggtggactcctggcataacggagtcaggaaatttgtcatcccccgcccatggccggattttttgagtttgcgctgatgcggaccaggggagatatcgatcagaagtatctgagtgaactttactaccagtatatgaatgtggaagaggactttgtcaaggatcttttctatgcaaccgagacgaagctgggacgtgtattcgtccaggaaccggttctcggtaatgagaatatgagccatatcctggattatgagagagccagccatattgtggaggaagccgactatatcggactgggactctgctactgccgtcataaagcggctcatgcgggccacccatgtgagaccggcgcccctctcgacgtctgtctgacctttggcaatgttgcccgttccctggctgagcatgggggacatgcgcggctgatctcgagggaggaagccatggatgcactggagcgatcctacggcgccaacctggtacagattggagagaatgtaagggaatatccggcctttatctgtaactgctgcggctgctgctgcgaggccctgcaggcggcaaggcgtttcgcgccgatgcagccggtggcgacaacgaattatatcccttcagttaatatggaaacctgcatcggctgcggaaaatgttccaaggtatgtccggtgctggcgatcaggatggaggaagaaaatccgtccggagaaagggagaagacaggcaggaggaaagctgtggtagataaagatatctgtcttggctgcggcgtctgcgtcagaaactgtccggtctcggcaatccggcttgagaagcggccggtacagattattaccccggtcaacagcacccaccgttttgtcctgcaggccatcgaaaagggaacgctgcagaacctgatatttgataatgaggcatttgccaaccacagggctctggctgctgttttcggaacaattttaaaacttccgccaatcaagcaggccatggcgagcagacaatttaagtccatctatctggacaagctgctttcggcccagattgagaagcagaaggcagaacagaagtaattaacgcagaagataagggagggacagatgcctagactattaatcaaacagagagtattttcctggaccgacacttacgatgtatatggggaggacgaaactccgaaatactttgtcaaagcggagtttctgtcactgacccatcagatccatgtatacgacagccgtacggacagagaagtcggcgcggtgagggagaagctgttcagcctgatgccacggttcgaaatagagttggacggagagccgaagggacatattgaaaagcgtttcacactgtttcgtccaaaatatgagatagattgtaacggctggtatgcagagggggattttctgggatggaattacgatatatacgaagaatgttccgccgtgatgcatatagagaaggaaatcctgcactggggggatacgtatgtacttgattaccagaatccggaggacgaacttttgggactgatgcttgttatcgccatcgatgcggctaattgcagcaacggatagtgcagacagaatgactgaagaaaggaatttgataagatggcagagaaatttggcagaaagctgaaaaaatataacagagccggaaccgcattactggcagggattcttcttgcatctgtgaatgtacggaccgcagccgcgagtaccctggcccgcggtccggcctgggagagtgaacagatgaggcttggactgttgacggatgaggcggccggaaataccgtttttaacggtgatgtcaacacattgaaggcagcggcagaggcatcccagttaattgtcgctgtgggaaatgaggcggatcccgcgcaggggacgctgacatggtatgtcagaaatcaggaagggaagctgataccggctttttcagtaccggcggtcagcgggatgaacggcatatcagccgataagcgggaaggagataagaagactccgtccggaatctattcatttaccatggcctttgggatgaaagacaatcccggcagcattctcccctatcacaaggtggtaaacggagatcattttgtggacgacagcggcagcaggtactataaccgccttgtcaatgaatcccaggtgcagaaggactggaattcttcggagaacctgatacgccaggcaccgcattacaattacgccctggttctgaactataatgatacgtatgttccgggaaaaggctcagccatattcctgcattgccctaagactgctaacaatacaggcacatccggctgcatcagtattccggaagaatatatgaagctgctggtgcagtccgttgatcagaatacgaaaatcattgtagtgcagaatgaaaaagagctggcctcctattagaagcagaagggacagcgtaaagcatataaatccggcagccatgcaggccattccattggggaggtactgcaccggctgttcggattttttcatttaacaggatagttctcctgttaaatgaaaaccgctccgaggaggagcgcactgcttcggcagaaaatctcgtcatttggcggcctgcctaaagaatctatacaggtaaaaattaagaatgagtaagagaaaagcaaaaaaagccctggtaaaatccggtataataaaaagaggaagaggaggagtattttatgaaaaaaagaacatgtaacaaaacggctgccctgtgcggcctgatactgctcgcgatatcctctgcggttctgggaggatgcggcaaaagtgaaatcctggcgctggatgcaaagacggtcctgccatcctatccggaatcgatagaccaggaaaaggattgggataagtggaggaaaaatcaggacgagaacgaggtgccacagtcatttatagagagtcagtccggctttacattcacgacggcgagagagcttctggccggccgggaggaaaatctggtctactccccggcgagcctttattacgccttgtctctggcggcatcgggaacacggggagaaacggccggggagctgtaccggtttctgggagtggaggatcccgacagcgccgctgagtatgcggggaggctctaccggattttatattgcgacagttccatcagccagatgcggatggcaacctccctttgggtggatcaaagcatgagcctgaaggaagaatttactaagacggcagccgcccggtattatgcatccctgcatacggtggatttctccgatgaaaaaaccggaaaagagatggggaaatgggtaaaggaaaatacaaaagggacgattgtgccggagatcagggttgaaggccagcagcttatgcatcttatgaatacggtttatttttacgatgaatggatcgaccggtttaatcagtcggccacaaagaaaggcgattttcatctggcggacggcaccacagcggagacagatttcatgaacgctacatacggctcccataattacagaaatggggacggatttgtcagttccagtctgggccttaaggagaacggctctatggtttttgtgctgccggatgagggcgtcccggtggacagcctttttgagacgccggaccggttgaaggaggttctggagggcggagaaagccatatgggcgaggtggttttccaggttcccaagtttacggccgatacacattccgatatcagagaggtgatgataaagctgggtataaccggaatcttcgaggatggagatttctcaggaatgacagataataaagggatttatatctcctccatcacccaggacggccatattgccatcgatgaaaagggggtggaggcatcggcatttaccgatattacttacgcaggagcggcgctccctgaaggaagggcggacctgatactggatcgtccgttcctgtatggaattgagaaaaacggcgtatggctttttatcggagtctgtgataatccgtaggatagagtaccagagcgtatttaaaaattcattcccgccatctgcaggccccactacgcggcatatttggcccgaattcgcttaccgtagcccactacgcagcgctcattcagaccaaatctcccacaaagtgtgacgtaccgctggcagaaagcaattttcaaacatgttctagcgattgggagacaggcggaaacaatttaaaaagttctgcctaagctgttccccgacagcttccggcagagcctgcctgatttctgcaatctgctgaagtgtaaaggaaagggatgccgggactgagagggatgccgcctttgcgggatgagtgcggaggttttccggagcttcttcgtatgcccatttgacagcgcccattccgtccgtctcgattaagatccgatcagcagggagggcggcagccagatttctcacggccggattccaccagacgtcggggccgatagaaaaataacagtcaagctccagaaaagactttggaaaaacagggtcggagtaccagtggacaaggtaggtattcggataacctgcaatcagggaggcaatcctttgttcctggcctttcgtgtgcagaataaccggtttgtccagttgggctgcaacggccaattgttcggtaaacaccttctcctggacagccagagggacgttgcaccagacgctgtccattccgatttcaccgatgacgggacattctgaaaaataagaaagcatttccgataatgaatactgaccggcataccatggatgaaggccgtaggtgggaattataatattcttatattccggccgggaggccaggccggagagctttacggcttcccttggattgcctgcgcacaggagggagcggacgccttttattctgcgctcttcaagttctttactgctgccgatatgggcatgggaatcacataaggtcatttttcttcctttccggtgcattagattcagactctgccggtcatgatttccgaatggattttctgtctcagggcgccctggttatagagccagtctctgttccgaaccctgtccgggatttcaatttcgcaggtgatatgggccggagcctggttcaggattaaaatcctgtctgagagatagagcgcttcatccatatcatgggtgaccaggagtacggtccggttcagcttggcccgcatactgatcagccagtcctgcatatcgccccttgttataacatccagagcgccgaagggctcatccagaagaaggatgtcggccttacacagggctgtccgcagaaatgcggcgcgctggcgcattccgccggatagggaggaaggatatttcgtttcatatccctccagcccaaatgcggggaaattcttagatgcctcccgcctcatttcttccatggaaccatggatctggccgtagaggcagacattatccaggatagtcttccagggaaacagcagatcattctgcggcatataagcaaaatgctccgacagtccggtaacaggctgcccatccaccgtaatccgtccggtctcagcctggatgactccggtcagaagcttcaggattgtggactttccacagccggacggtcccagcaggctgacaaattctccttctttaatagaaaaatccagattttcaaacagtttcttattatcatatgaaaacgataatcctgatacttccaactttaccatcggttccagtcctttctttattccggaagaaattcgttcgtatagcagtcggatgcagggataagcttgtcaattaccccgtattccatcataaattccgtatatctgtcccaaacctcatccttcataacaccccatctgtccgcatcctccatatacttatcggcaagatagttctgtgatatttccagcatctcaagaggataatcaggagcatatctctggaggatggcagcgcctgtctccggattttcaattgcgtattgatatcctttctctgttgcggcaagaaatttttttaccaattccggtttgtttttcagtgtatcgtcggaggcgataatcacaggagtatagtagtcgagacgctcgtcaagctcccttaccggcatatagtcgattggaaaatcattcatctggcattttacattatcccaggcctcataaaaccacatgatatccgccttatcctttaatgcctcaaaaccggaaccgtcggagattaccatgttaagttttgaaaagtctgcgccatcctttgtcataacggcgttcaaaacagcttcttctccggggccgccccatccggcgtacgttttaccctcaaaatcttttggggattttattcctttaccctcgtaggtggcgaaaccggaggtgttgtgctggatgatggcagcgattgctttaattgggagtggatctgccgaagtgcgggctatcgtgacatcttcctgatagctgattccgaaatcaccttttccgactgccacgagagttgcagtggctccttccgtaggttcgatgatattgacttccagtccttcttcggcataatatccctgatacagggctacaaacatgccggtatgattggtgttggccacatagtctaaaatgacggttacggtttcaggtccgtctgtccctctgccggtaaaacgccctgggaatctgtcccggatgctccggtttcttcggaggcagctgcgtcggcggacggggcggcagttggctgggcggctgactccggagctttggaagaccgggaacagcccgtcagtgcgccggaaaggacagcggtggacaacaggattgctagcattttctttttcataattattctccttaattgtatattaattattactattcatggcctgtatcccgcgaggtgtttttgtgcatatattgcgcgaaaatcccgggttacatggcgtgaaactgcatttttcagcaggtccgtgaatagtgatattaatttttggtgtgcaggtagggcagggcggcaagctggtagaggcggatgagcccgttcatacacaggctcaggaaaatgataaccagaacacaggcgaataccttgtccagcatgtaactgtttttgactctcagcaggtagtagcccagtcctttctgggagccgatccactctccgacaacagcgccgctgatactgtaggtggccgaaaccttcaggccggacagcagagagggaacggcggccgggattttaacgaggcggtatgttttccacctgcctgccccataggagcggaccagatggacatactcctcatccacctgggcgagcccgtctgagaagctgactgcgattgggaaaaaacacatcaggacaaccgtcagaattttcggggcaaccccaaaacccatataaataatgaggattggggccagcacgatcatgggaaccgtctgggtgaccacaagaaccgggtatagtccctgcttgatgatgggaaaacagtccatcacgatgccgagaagcagagccagtatcagggaaattacaataccggacagagcctctgagacagtgactgccgcatggccgcccaaggtgccgagttccgaaaaaagtgttctgattacctgtaccggtgatggaagcacatacaaaggaatatggaaaaatcctacggccgcttcccaaatcagcagcaggataatgatgaaaagggccggtattatattttgacagtattttttcatgaatgactccccgttttaaatggtaaagtaaaggtatatttcacaggataagaatgactcccgcgtggagagctttcctgttaaataaacaaaaatcccgccggataatggcgggatatcaaggttcagtatttcacgtccctacgttggcattatccaaatcaggtaaagggtcgaaattaacaatttcctctcagccagtttacaagctcccctgtttctttttttactagctgattgtagcatgaaagtcggaggaaatcaatcctttttgtcattttggaccggactgtggtaacagtttagacatgatgtattccgcgaggtgttttcgctgttttttgcgaaaatcccgagatatgcggcgcgaaacggcgttttctgccgtttctgtgcatcatttgttgcagtttggccggaggctgaactgtaacggactgtgccagtataagcaggatggaatcataagcgccaggttctgactatatgaatccatttataacaatttatatcaatgtatgaaagatatataataacggtatctcgtgagacaggtttaaaaatgacaaaggctgttattgcggccgcgcgcgctgtatcggtaaagaatggaggtatggatgaagtttgaccttatattaaaaggcggccgggtgtttgatccggttcatcacagggataagtgcctggacatagggataagggaggggaaaatagcctcactcgaagatacacttgacggggcagacgagataatagacatctcaaatttgaccgcagtgccaggcgtaatagatatgcatgtccatgtaaccaggctgctgggcggccgcgtcggatattatatggcggccaaaacaggcgttacgacaatcattgattatgcagggcctgtgatggatattacatcaaatctggctttatatggctgtgggatgaacgtgggctgcattgatgcagtgctgccggataaattgggcagggatccgtcccggacacaaataaaagcctttttagacgaatcactggcaaatggttccctcgggcttaaaattttaggcggacattatccgctgacgccggaatcatccagaatttgcgtggaagaagcaaacaaaagacaggtattagttgcctgtcatgcaggaagcacgaaaaacaggagcgatattttcggcctggaagaagccgtggaatttgcaaagggacaacggctatttatggcccatataaacgcttactgccgcggcaacagatacagctatctggaagagctgagggatgctttcaaacttcttcgggaaaatcccaacattatttccgactctcatatgtctgtcggcaatgggacgagcggactttgcagggaaggagtcccctgcgacgccatcacggtgaattgtctgaagatgttcggatatgagccgacggaggaagggcttcttgccgccatgcttgcaggaaaagtgtgtgcaattgcagaacttgaaaaagaaaatgttctattggagaaggaggaagcggcggcctactggaaacaaaaggggaagaacattaatgtaagtttccccgccaacctggcatcggtggctgctgcctgcgttacggagcgtcttgcctttggcggttcatttttaatagagatggcggcgacagatggcggcggttttccgcgaaacggtttgattcagaagctattgtcattttatcgtctgggctacttgtctttggcggaagtagtggagaaatgttcggtaaatccggctgcagcctttggactgactggaaaaggccatttaggcccgggcgcagatgcggatattacgctccttgacatggaacggcttgaggcagttatgagttttgcggcgggaaagcggatcctcgaccgtgaaaaggtggttggaacggggggaacgttccttacgacggaaattggaatgaagaaggcaagggagaaagggctttgctgccggatggtaaatacggccggcagctcattatacggaaaaagggaggaacggagcggattttcaggaaagaacacgacagggacactgaaagggtaatgcaagcttagaaggagaggtttggttatggaggggaatatgcagaagaaaaaagtctctttgatacaaaaaatcattataatctgcggcaaggcgggagataaactgccgcatccggcaattctttattgttatgttactgcgttctttctgttggtggcacattttttaaacgggacggagttccggattccggggcaggaagaagtttcaagggttacaacgttacttaaccgtccggggttggaatatatgctgacaaagatgttttccaatttttcagggatgtcgattctgcctattctgattgtgatggcggcggccgtcgggatcggggaggcatccggtttttgggagacattggttgtcaagtgttttaaaaaaattccggatcgatttttagtattcctgtttctgctggtttgtatcaatggaaatctaatgtccgatgcttctttgattatttttccggttctcggcgccatgctgtttcagagcaggaaccgcaatcctctgcttggaattacgctggcctacggaggatatttgtgcggattgagcgccaatctgtttttggcatccaccgacgccaatgtggcggctgtcacgaacgatgtgcttccaacactggagattacaaaaaacctgaccattcatgtggcaagtaattattattttatggcagtcagcgctattgtgctggctattgtaggcacctttataacgaagtgggtggtagaacctgccattaatcaagattctaccattgactgcaaagccggctttgaccccgacgcattcggaggacattcgccggaacaaaacaggggcctgcgtctggccggtctggtatctctgtgctatattttgattatactggccatggttatacccaaaaatggcttgctgcgcaatgcggagacattgacgatattaccaaaatcgccgttcatgtccagtattgtcccgcttcttgctatcttgttcggcctggcgggcgcggtatacggctttgctgcaaagaccatgacgagagggacggatgtcataaacgcgatgggcaacggaattaaaagtattgcaaacgtgctggttgtattttttatcgccgcacagtttattaactatctgacaaagacaaatctggcggcctactttgcagtatcaggagctaattggctggcaggtaaaggtttaacgggaatccccctcattattgcacttgttatacttgtatccataatcaatatttttgccggatcggtttccactaagtgggcgatgattgcgggaatcatcattccgatgatggctcttttaggatatcatccggcttatgcccaatgtatctaccgtgtgggagatgcactgacaaactcggtcaatccgattttctactatcttccgttgattcttggagtagtgcagaagtacaaaaaggatgccggagtcggcacggtgatggcttatcaaatcccttattttcttggctacagcgttgtctggaccgccatgctgatcctctggtatgtgatgggatggaatttaggaccgatggctccggtcatgctttagtatccggaacgataatctgcacgctccgcgcacaggtcactgccttcaacaagtatcaggagaaaggaaaagggggaagcttatttgacaatagaaatggaatacatatatctggtataccaggaaaaaagtttttcgaaagcggcaaagaaactattcgtaagtcagtctgctgtcagcgccatggttaaaaaaatggagggaaagctgggctgccagatatttgacagaagtacaattccgttatctgttacaaaggaaggaatgtattatatcagttgtatagaacggtttatgaccctcgaaaaagatatggacgcttactttaaggatgtctcggacgttaaaacgggacatctgtctgtgggaagctcctcctttttctgcgcatacctgctggcggatctgctgaagcgtttcaagaaaaaataccctgggatgcatgtggaaatacatgagggaaatatcaaggaactgaaggccggactgatgaacggcacgatagactttctgctggaaaccgccattcctgctggggagagcgtggaacggtatctatttgatcatgaagacatcattttagctgttccggcagattatgaagtcaacaaaaggctcagggaatataatatgacatttcaggaggcaagggacggggtatttaggcaggcaaaatttccggcagtcgatttaagcgttttttccgggtatccgttcatcctgctcaaaccggagaacgacatttcagccagaagcatggaaatctgtaaaaacgccggttttataccgactgtggagctttatctggatcagattatgacggcattttatgtggctaaatcaggcgcgggaatcacatttatcagaaacagcctgttgagtctcataacggatacagatgaactgtgttactataaaatcggcgacccgctggcaaggcgtgagatatatgtaacctgtaaaaagggccgctacaagacaaaagcgatagaagtattcctgtctctttgcggaatcagccttgaaaaaaatgatgtgtgaaaaatcctgattattacttgtattttgcatccggtggaaatataatgtatttacatagttagaaatatatggaaatcaggaggtaacaaaaatggaattaaaattttatgtctgtgagcattgtgggaatatcatcacgtatgtgcgcaacagcggagtaccggttatgtgctgcggccagaagatgacggagcttgtgccgggaaccagcgacggggctgttgaaaaacacgtaccggcagttgagacagacggcagggcggtaacggttaaggttggagaagtagagcatcctatgatggagcagcattatattcagtggattgccctggagacaaaagaaggagtacagattaagcatcttacaccggagatgaagcctgtggctgaatttgcactgagtgcgaacgatgaagctgtggcagcatatgaattctgcaatcttcacggcctctggaagaaagagatctaatatgacattgggagcagggaggccggttgcgttttcctgctttctttatagatgggggtgacctgtacgcagagcgtgcaggttatcgccataggcggcggccagtgcgcaaagggaggaaaacggatgaaaacaatagggatgatcggcggaatgagctgggagagtacggttctctactatcagatcataaacgagacggtgggaaaagagctgggtgggctccattctgcaaaaatcctgctgtacagcgtagatttcgatgaaatagagaaataccaggccggcggcgaatgggagaaggcaggggaggtcttatcggaagcggcggtaaacctggaaaaagccggggctgattatcttgttatctgtacgaacactatgcataaagttgtgccccagatacagacgcatattcagattcccattatccatatcgcggaggcaacggcagatgtgctgaaggagagccggatccggaaggtggctctgcttggaacaaagtatacgatgacccaggatttttacaagaaaaaactgaccgatgctggaattgaggtactcattccggagcagccggatattgaaacggttaataacgtgatttttaaagagctgtgccgcggtgtcgtttcagaaaattcgaaacagcagtatcttgcgataattgataagcttgccgccaaaggagcccaggggataatattgggctgtacggaaattggaatgatgatcagccgggaagatacacagcttcctgtttttgatacgacaaggatccatgccgaaaaggccgcatacctgtccattcaggactgaggcccggtcagagccggatattgcgctgagtgaaccgtaacagaggccgtgtgacaggagcggccggacagttacaggcgctcagccgcaatatccgtttttttaattccgggaggaatttatctgcgtccgccgcccattctctttgagagggtgcgaagtgtctcaacctgttttttctgtgccgggttcatgcccgatgtcagaatcgatacgatgagttcagtttcctgatcattgaaatccaaaccgttattgccggcggccatgctcatcagcagcggcattaatttgtccttaggcgtttttcctgccttatcggccagctccgtaagatattttagctttttttcatccatgcctttcagacggggatcctgtctccagttttcattcataatttaagttcctttccggtgttttgatttatgagaactgctgaaacgtctgcatcagcatttgcgctgtttccagccgtgactgttgctcaggcggcagcatgttcttaatctggtcgatgggaaaacggaaatgatcgtttcggcttctgttctgggaagaagcgtttccggaatccctgtcatggctgcgttcattctgactgcgttcctgattatgtacctgttcctggcgcggttcctgccgtggaatctcctgatccggaacgtccatgctgtccatataggactggtatagctgggagccctgtaggaaattgatgataagatcaatgaaatcctgttcggcttctgttccgtacggcttcatcgcattcagcatatccagcggggaggccggtgcatcttcttccagcgaacaaatccccagttctccttcttctttttttccaaacagctgaacggtgcgttccagttcaccgattttgacaagcagggaaaagatacgctgttcctgtatattgatgtagggaagagccgctttgatcatctgaagatgaggcgcggccgtcagataatccagctctgtcatttttaaagtctgttcattgctcatgggacaatacctcttaattccttgcctaaatatatgcacgaaaagaatagaacataccgacgctttggaaattaccgcatatactaaagtacgatgaaaattacaggaggaaagtgggaatgagcacccgtttaataatagaaggcaacagcgtatacgaaatcgatgaagactgccttgcctgcagtgaaaaactggagaaggagaaaaaagaacccgttaaaagacctggtgaaaggatagagcaccggggaggacgcagggaaaaatagagattgaattaggcaggtggggacgccgccggtacggccggcggccggggtgtatatgagtctttcgtcccgggggaagattgtcgcggtgggggctgcgggcgaagataaagtctgcggagcacactcccgctctgtgaaatgcattgcgctgctaagctcggcaggacctcgctaatcagcgatggatttaggcggcatccgcagcaattcattccggccggattccccttcacgaccaacctcccacggggacggaagactcagccggccccctcaccacaccggcccccggacgcgtcctccgttctcaacgaaaatcttgttcttcatacggctctatggtaaaatatctgtaaaccatatgcgccggcaaacagggtgagctgcgggaatggacagtccatatacggaggataaatttgtgattcattataagaactatgttaaaccaaaggatttagaagaggcatttgcactgaatgccggaaaatcagcagtgatagcagggggattctgctttctgagactgcagcaaaagaatatcggcacgctcctggacctcaaggagctgctttcggatcagatagaggagacgggggacggattccggatcggagccatggtttccctgagacagatagaactgcatgagggattgaaccgctatacggcgggcgctgcagcagattgtacacgccacatagtcgggacgcagttccgcaactgcgctacggtgggaggcagtattttcggcaggtttggtttttccgatctgctgacctgttttcttgtcatggattcatgggtggagctatataaaggtggacaagttccactggccgaatttgctgagatgaagccggacggggatattatgaccgcactgctcataaagaaaacggggatgaacatggcctatgagatgatgcgcaacgaggcggttgattttccggtgctttctgctgctgcggctgaagacggcgcgggaaatacgcggatagccgtcggcgcaaggccgtccagagccgggcttgtgacctgggaaggtcagctgtccgcactggacgcaaaggagagacaggagcaagccgccaggcttgcagatacatttaactatggaagcaatatgagaggcagcgcggagtacagaaggtatctggcgggcgtccttttggacagggcggctgcgcgcattgcggcgcagaaaatgaaccgggaggaaaagacgagatgaatctgacatgcagtattaataacaagacggtgagccgggaagtggctcctgatatgatgcttcttgactttctgcgttcccagggctgctacagcgtcaaatgcggctgtgaaacaacgaactgcggactctgtaccgtctggatgaatggaaagccggtgctaagttgcgctgtccctgcgcttcgtgccgggggatgtgagataacgaccttggaaggcgtgagggaagaggcggaagaatttggacggtttctggcaggtgaaggcgcggaacagtgcggattttgcagtcccggattcattatgaatgtgctggcgatgaagagagagctttcaaatccggacgatagggagattcgcgaatatctggccggcaacctctgccggtgcaccggatatgcagggcagatgcgcgctgtcagaaaatacctcgaagccgtcggaagacaggaggcagaaaaacaggagacagagaaacaggaggcgcagaaatcatgaaccgagaaaagaatgtgaaccgcgctgtgatgaaaaaggatgccatggctcttgtgacgggggcgccggtttatacggatgatctggcgccgaaagactgcctggtggtaaaagtcctgcgaagcccccatgcccatgcgctggttaagacaatagatacaaaacgggcgtctgccgtccccggcattgcatgtgtgctgacatgggaggattccccggcgtgccgttttacccaggcagggcagacctatcctgaacccagtccctatgacaggagaattattgaccggagactgcgttttgtcggagatgtggttgccattgtggccggcgatacggaacaagccgtggatcgggcattaaaattaataaaaacagagtatgaggtgcttaagccggttctggatttcagaaaggcaaaggacaaccctgtactggtacatccggaggaagactggaagtccctctgtccggtgggggcggacaataaaagaaacctctgttccagcggaagcgaatcggatggcgatgtggaagccgttttaaaagactgtgatctggtgattgagaggacataccatacaaaagccgataaccagaccatgatggaaacattccgggcatttacgtatctggatgcatttggcaggctgaatgtggtggcttctacccagatccctttccacataagaagaatcctggcgaatgcccttggcataccgaaatctgccgtccgcgtcgttaagccgagaatcggagggggattcggagcgaaacagaccggggtggcggaaatctatccggccatcgtcacgatgaagaccggacgccctgctaaaatgatatatacaagatatgagtccatgatagccgcctcgccccgccatgaaatggaggtgacggtccggatgggtctgagtaaagagggaaaagtccgggctgtggatatgtatactctgtccaacacgggagcttacggcgagcatggaccaaccacggtcggattgagcggccataaggcaataccgatatacacgccggaggcattccggtttacctatgatgtagtctacacgaattaccagtcctccggggcatacaggggatacggcgccacccaggggctgtttgccgtggagacggctttaaatgaggcggctgcgcttctgggtatcgatccgctggaaatcagaaggaagaatttcctccgggaaggacagattatgccggcttattataatgaacggctggagagctgccatgtcagccagtgcatggaaaaagccagggccatgatggattgggataaaaagtatccgtttaaggatatgggaaacggcaaggtgcgcggcgtcggtgtcggaatctctatgcagggctccggaataccctgtgtagatgtgggtaccgtcacgatacgcctgagcgatgagggccactataatatgatgatcggggcgaccgatatgggaaccggctgtgatacgattctttcccagatggctgctgactgtatggattgtgatgtgaaggatatcgtggtgtcaggcgttgataccgacgtatcaccctacgattccggttcctatgcatccagcactacctatgtgacgggaatggccgttgtgaaggcatgcaaggagctgcgggagaagattatcgcacagggggcggagcttttgggcatacctgcaaaaacagcagactttgacggcgcctgtgtttatgccgcgaatgaagataaagcaaatgatgggtcagcaagtatttcactcaaggatatatccacaaaacgtatgtgcggttcgggcctggctctggaagccacggtttcccattcatcccctacctctccgcctccgttcatgtgtggaatggcggaagttgaggtggatctccaaaccggggaaattgagctccttgagtataaagcggccgttgactgcggtacggttatcaatccgaatctggcgagaatccaggcggagggcggcatcgtccagggaatcggcatggcgctttttgaggatataaattatacggataagggaagactgaaagagaactcctttatgcagtataagataccggcccgagtggagataccggatctggaggtggaatttgactccagctacgagccaagcggtccgttcggcgcgaagtcggtgggtgaggtcgttatgaatacgccgcttccggccatcgtacaggcggtttatcatgcaacgggtctttggttccgggaacttcctgttacgccggaaaaagtgataagggggctgggtaaactgcgatgatacatgtgatactgctggcagccggatattccagccgcttcggcagcaataagctgctgcatatagttgacggcactcccatgtaccggcatgcgctggaaactgcagagcagttcaggcagcggtactgttgtgagccggtcaggctgattttcgtgacggcttatgacgatatcggaaaacaactcagggagaaggacggattctgcctgttcggggctgccaaggccgggaacacggcaggccgggatctggtcgtgatgaacccgaacagcgggcttggcatatcccactcgattgccctgggggtgaaggctgcaggcgcggaccggtttcgggaagatgacagcctgatgtttatggtctgcgatcagccgtggctgacgccgggcgatctcttaaacctggcagcctgttttaaaaggtcgggaaaatcaatcggctgtatggcatatggagaacagacgggaaaccccgtcctgttttcggccgtctaccgggaggaactgcttgggctcaggggagacaccggcggaaaggccattgtcaggcggcaccctaacgaggtatgtctctgtccggtatcagatcccagggcgctggaggatatggatgaattgcagtaacagttcatgctgtccgaactgttacgaaatgccgtaacagtaacggtaaaaattgacaatgacattgacagggaagaagatgagtgagactgtatgaatctctataagataatgctggtggatgatgaggaagaggtaagaaagagtattataaataagattgactgggcggatgccggatttgaagtaatcggggatgcggagaacggcaaggatgccctggaaaagattgaacagaatgagccggatgtggttctgaccgatattaagatgccgtatatggacggactgacaatggcggagacaatcaggcagctgtatccgtctgttaaaattgtgattttctccgggtttgatgaatttgaatatgcaaaaaaagcaatcaagctgaatgtaattgagtatatcctgaaaccggtgaatgtggaagaactgacggccatcctgaagaaaatcaagaaaaatctggatgaggagattgaacagaagcgtaatgtgaatctgctcagggagagttatatcaaaaatctgccgattatcagggagcatttcctgaatgacctgatccacggcggagtaccccgggatattatcccggagaaacttaaggagtatgatattgatatcgacaatgcccagaaatgggtaacggcagccgtccatctggaacccgatgaaaacgtggataaggcattgtcgcttcataaagagagggagctgattccaatttcggtcaggaatatgattgaagagaagctggatggacaattccgcttcatcatgttccactcgtcctttgagagcgttctgatcgcggccatagatgaaaacaacactcagacggggctggtcgcgctcctgggcgatatctgcaaggagacgaagaaaatactggaggtttccgtcacaatcggagtcggggaagcatgtaattccctggccgacatagggggttccttccattccgccctgaatgcgctcggctaccgggccgtggccggttcaggcggcctgatttatatccgcgatgtggagccgttcaatcatggaaagctccagtttgacagccggatggagtcggaactgattgcagccgtaaaattcggaccggaagataaaatacgttccgttgtcggagacgtggtgggaaaaatggaggagacaaaggttcattaccgtcagtatcaggcatatatcctggctgttatcaacgccctgacccagctgtcacagcagtatgatctgagaattaatgatatgttcggtgtgcagaccgattattttgagatccttacaaaggtggaaaagacggaaaatatcaggcagtatctcaccgaagtcgctttcaaaatgaaccgggcaatggaggaagaacggagtaatacgacaaagaacgtaattcaggaggccaggcagtatattcaggagaatttccgggatcccgatttatcggtggaaaaaatctgccgtcatctccatatgagcccggcctacttttcaaccgtcttcaagaaggagacaggacaggcctacatcgcctatctgaccgacgtgcgcctgaaccgggcggtggagctgcttatgacgacggaggataaaacttatatcattgcagaaaaggttggatacccggagcagaattatttcagttatgtctttaaaaagaaattcggggtatctccgacaaaattcaggggagccagataaatggaaaaaaaggataataaccagaggcggccgttttttctgaataacagtatacgcaccacgatttttatttatttcacggtgacggcgctggcggccggcctgctgattacattttccctgtatcagagactttccgggcaggttacggctatggtacaggatgagaatcagaggctgatcggccaggtggcccgttcggtggaatcttatctgcgcacaattatgaagctttcggattccctttattacggagcggttaagaatgcggatctgtcgtcggagtcggtcggttctgagctgacgctgctctatgacaacaataaggataatgtggacaacatagccctgttttcggaggacggcatgctggtcgaggcggtgcctgccgccagactgaagccgaatctggatgtgacgggggagccgtggttcagggatgccctggaaaagacggaaaaccagcacttttcgcttccccatgtgcagtacatttttgacaataatgagaaccagtaccgctgggttatctcactgtcccgcgccgtggaactgacaagcggcacctccacggctcagggtatccttctggtggatatcagctactcaagcctggaacagctctttgacggcgtaacagccggaaagggcggctatgtctatctgatcagcagtgacggagagctgctgtaccatccgaagatgcagttgattgattcaggaagaatgcaggaaaacaatgtggcggcggcagcctataaagacggaaaccatatggaggaatttgacggaagcagccgttttgtgacaatcaaatccatcggttataccggatggaaagtggttggcgtgacgcctgagaatgtcgtcacactcaacacgatcaaaacccgtctttttattgtatttatcatagccctgattctttttatccttgcccttattaactcctacatctcttcaagaattaccaatccaatcaaggaactggaaaagtcggtgggaatcctggaggaaggcaatctggatgtgccggtctatgcgggcggctcctacgagatacagcatttgggtaaatccatcggggatatggcggcgcagatcaggctgctgatgaaggatatcgtcacggagcacgaggcaaaacgaaagcaggagtttgatacccttcagtcgcagatcaatccccatttcctctacaatacgctggatattatcgtatggatgattgaaaatgaacagaaggcggaggcagttaaagctgtaaccgcgcttgccaggttcttccgaatcagcttaagcaagggaaaaagcatcataacagtgcgggatgagctggagcatgtcagaaactacctgatgatccagcatatgaggtttaaaaataaattcacctatgaaattcaggcggaggacggcgtattggagcttgccagcctgaagctgatgctgcagccgcttgtggaaaatgcaatctatcacggcatggaattcatggacggtgacggtgaaatccttttgaaggtatggaaagaggagggggatctctatttcagcgttatcgacaatggtcttggcatgacggaggaacaggtgggaaatctttttaccggagcctcccatgtagattcgaaacgcggttcgggcatcggagtcaagaatgtgaatgagaggatcaaactctattttggggagaaatacggcctgtccatcgaatcggaaccggatgagggcacaacggtaaaaatacatcttccggtcgtgacctacagtgaagccgtggagagggggatggtgtgatggcaaagcaggagaaaatcctgtgggggttttttgcgggaatacttgtctttttatatctcttatcctccactgatttgatcatcaaagagaagaagacggaaatttatcccgtttccattgtaatcggtgatacgacggatgactattatgtcaatttccgcaaaggtgttgaacaggcggccgatgattataatgttgacattagctttattactctttttgaaaaggaagatgccgacagccagatggagcttgtaaagcgcgagatcgaagacggagcgcttgcagttatcctggagccggtcgatccggtggaatgcatgagccatatggacacagcggctctcggaagtcctgtcattgtcgccggagaactgctcccggtggacagcgtaaaggcagcggtttccattgatcattatgaggccggtaaaaagatgggcgaggcaatcgctgcggaacatgaaccggaactgccggtttatatatttacggataaccagggacacagctacaacggggaggtatttgaggggcttaaatcggttttggaggagaatggctttgccatggcggtctatgagcggaaatcgcccgacacattccgtaaggtgattgaggagacggtgtatcccggaagcggtacggcagtcgtggcctgtctggatgcatccagcacaagtgaggcagccgatataattggcggaagcccggtctacgggcggtatattgccggcctgtatggtacggggacgacgccgtccctcctgggccagatggacaaaggggtaatccgcggaatgatagtctcaaatgagttcgatgagggttacctctgcgtggagaaagcagtggaagccatccggcgcggcagcgcaagggaacagattacgcttgaaacgtattatatagaaaaaacggatttaagggaaaacaaatttgaaaaaattctgtatccgatagactaggggggatttctatgaagaagcgaacgcatatctggcttgcggcggccgccgcagtgattgccgtgctggccgggaccatgattatgaagaataacggcggggaaaagaaggaggacaaaaaatcaatccgcgtcggcgtggcgctgtaccgaggcgatgatccttttatcaacaacatccgttcaaagctggaggaaaaggctaaatcatatgaaaagggaaccggagttaaggtagtcatggatgtggccgatgctaagggaaaccagaatacgcagaacagccaggtggaccgttttctttccctgggctatgacgccatctgcgtaaatatggtggaccgttccgccgcctcctatgtcatcaacaaggcgatggatgcagatatacccgtgatcttctttaaccgcgaaccagtggaagaagatatgaaacgctgggagaagctctattatgtgggagaggatgccaaggagtctgcggtactgcagggaaatatactggtggatctctaccggagcaatcccgacggactcgatttggacggcaacggaaaggtgagctacgtgctgttagagggtgagagcagccatcaggattcactgatccggacggagtggtcgatccagacattgaaggatggaggcgttcccctggaaaaactgacaggcggaattgccaattgggacagaagccaggcctcggcgctgatggagcagtggatggaggaatttccgcgggaaattgagctggtgatttgtaataacgacgagatggctttgggcgccgctgatgccctggaacggggcggtgatacgaggccggtcaaaattgtcggaatagacggaacgccgcagggcctggaaggattaaagaccggcaagttgttcgggacggtccagtgtgacagcgaagaatatgcggacgtaatatttgagatagccgccgccgagtcactgggcagaatgtgcaggataaggtggagctcaagcaggggaaatattatcagtgcagtcagatggcgctgacgtcggactcagtaagataagatttaactgaggtttggaggacgcgtccggaacggaccatgtccggtgtggtgagggggatggctgagtcttccgtccccgtgggaggttggtcgtggagggggaatccggccggaatgaattgctgcggggaccgtttgcactctttggagtgcgcagcagtgctaagctcgtgagggacctcgctaagcaccggcggactcccatgtcccctccgcaattgattccgcctacttccccgggtcagtttttcgccggggacggaacactcaggcgaaggttttcgacaccgaacatggtccgttccgggcgctgattgtctccaaccttaaatggggaggaccctgtcgcggccactacgtgtttctggcaagctgatatcaattcttccgcaatttttataaaaggcgcattgaaggcatatcatatttcctgcacatggtagcactgagtggccgcgacaaggtccgcccccgcacttaacgcgtgagacactcagcggccgcaggccagcggacggggccgatacacccggcagagtctttcgttccggcgaaaaccttccgggagaaggggatactgccgacatcttccggcggagaaggagagaatgatatccggaaggacgttcgcccgagagatgatagctctaaggcagagggagacaaagcgcgccgggcggattttagccctacaagggcaaaatccgggacaacttgagcttcgaactcattcggagttcggagcgaatttgtccgtaaccccgggggctttgccttcctctgtcttagagctatccctcgaagaagcagtccagccggatatcattctctccggctccgccctgcgaaaacaaaaccacagtatctccttctccagccagcgatgccaacccccgggacgaaagactcatataaacaccccaccaccccgtccgctggccgtaccggcggcgtcctcacctgcttaattaaatctccattttgcttaactcccgtcggcccaatcaataaaaaattatcatgatctaaaaaaaattatataagtcccaaaaaaatcatatggaaatatgaccaaaagccatctataataagggtgtcgatgagttaaaataaccaatcgacaaaaaaatactatattaagggaggaactagtattatgagatcactcaaaaaattcatggcagcaggacttgcagcagcaatggtattttccatgacagcttgcagctccaaaccagcagagacagctgcaccggagacacaggcagagacaacagcagacaccactgccgaagctgtagaggaagcaaaaactgaagcagcagaagctgtcgagggaaaagatcctgcagaagtgaaggttggcatctccatttatcagttcgctgataacttcatgacagtatatcgtcaggaattagagagatacttaacagaagagttaggcgttaagaaagaaaacatctccatcatggacggaaagaacgaccagggtgagcagatgaaccagattagaaacttcatcacaacaggtgttgacgtaatgattatcaaccttgtacaggcttcttccgaaccaaccgtaacagaagagtgtgctaaagctggtatcccggtagtttacatcaaccgtgagccggaagctgagagagagcaggcttgggttgacgaaggaatcaaagctacttatgtaggcgcagacgcaagacagtccggtaccttccagggcgaagagattgctgagcttgagaacaaaggtgatgcagacggcgacggcgttgttcgttacatcatggttcagggtgacccggagaacgtagatgctcagtacagaacggaattctccattaaagctttaacagatgcaggcattgaggtagaagaactcgttaagatgcgtggtgactgggatcagacaaaaggccaggaaatcacagctaacgcacttgcacagcacggcgctaagatcgacgtagttttctgtaacaacgatgctatggcacttggtgcattacaggcaatcgaagcagccggcagaacagttaacaaagacatctacttagtaggcgttgacgctttagttgaggctgttgagaacgttatgaacgacaagatgacaggtaccgtatttaacgattaccttggccaggctcacacagcagctgacagagcaatggattttgtaaacggcaaagacgttaagaacgtatacatggtagactatgtaaaagttacaaaagacaatgcagcagagattcttgaattagttaaataatgtaacaaatcgttacagtaattctgctcggcagaaattatgagtaaatgcgtcgggtgtgtcatcttggcacacccgattttatgaaaggagagaatgggatggcagagtacagattggaaatgcgcggggtatcgaagagctttcctggcgttaaggctctggatcaggttaacctgaaggtccgtcctggtacggttcacgcgctgatgggagagaacggtgcaggaaaatccaccctgatgaaatgcctctttggtatttaccacatggatgaaggtgagatttatctggacggagagaaagtaagcatcgctaaccctgatgaggcgcttcagaaggggcttgcaatggttcatcaggagctgcagcccataccggagagaactgttgcagagaacatgtatacaggccggtatccgatgaaacggttcggcccgattaaggtgattgaccataagaagatgtttgaagagacggcaaagtggctggaagatgtgaagatgccctacaacccaaaggcaaagctgggaaccatgtctatcgcacagatgcagtcggtagagattgcgaaagcagtatccctgcaggcgagagtggtgattcttgacgagccgacctcctctctgacagacaatgaagtagatgcgctcttccgtatcatcagagacctcaggagcaggggggtatcccttatatatatttcccataaaatggcggaaattcgtgagatttgtgatgatattactatcatgcgtgacggtacgtatgtcggttcctggagcatgaatgatatcacagacgatgagattgtaaaacagatggttggccgtgagctgacgaatatatatccgccgaagaatgacgccgaggttggcgaggttcttctcgatgtaaaaaattattccagtattcacgagcgttccttccagaactgttcgttccagcttcgaagaggcgagatcctgggcttcggcggcctggtgggcgcgcagaggacagagctgatggaagcgattttcggtatgcgccacatctcaacaggcgacctggaaatcaagggtaagaagacacatgttcagcgtcctcaggatgcaatccgggcaggtatcggtatgattaccgaggatcgccgtggtaccggtattctgggctgtctttccatcgcagacaacgtatccatatcctccatggatcagtacgtggaagcgggaataaagctgaataaaggaaagattgaacagcttgtcaaggataatgtggcgaagctcagcatcaagactccgagcagcaagactttaatccagtcgttgtcgggaggcaaccagcagaaggttctgatttcacgctggctggcaaataatccggatatcctgataatggatgagccgacccgcggtattgacgtcggcgcgaaatacgagatttaccagattatgattgacctggcgaagcagggcaagggcattattatgatttcttctgaaatgccggaattaatcggtatgtccaaccggatccttgttatgtgtaacggacatattaccggagaagtgaaggacgaggaagcaacgcaggaacgcatcatgagctatgcgaccaagttctagtgataggaggaagagagaatggataagaaaaaagtcaatgtagcggacatactcataaataatggtattattatattaatttttctcatggttattttcgttggcgtaaccaaagaaaatttcttttccggcagtaacttcagcaacgtttccattaacgtagcctgccgtttcattatcgcagtcggcgtatccggctgtctgattacaaaaggtaccgacctttccgcaggacgtgtcgtaggtcttgcagcctgccttgcaggtacactgcttcagaaagcagattacagcggacgtttcgaacttaccaagaatttcccccagctcaatgtatgggtgattctcttaatctgtattgccatctgctgtatcttcggtcttatcaatggtattgttatttcatatttaagcgtaccggccttcatcggcactctgggtatgcagatgatcgtatacggaattaacctggtttatacaaaatccatcccgatcggcggataccgtacagactatacagccattgcaaacggtaaattattcggagtattcccgtatctgtttatcatcgcaatcgtaatcggcctgattatgtggtttgtttataactatacccgccatggcaaatacatgtatgcaatcggcggcaacgaggcagcggcagaggttgccggcgttaatgttaaaagaacgaaaattaaaatctatgtgacggcagctacactctatgcaatcgcaggcttcctgctgggcgcgaaatccggcggagcttctgttaacatgggtatgggctacgagctggaggccatcgcggcctgtacaatcggcggcgtatccgttaacggcggtatcggacgtgtatccggtgtcgtagtcggagttcttgtattcgagcttctgaagacatgtctccagttcctcggaattgacccgaactatcagtatatagcacagggtatcgttatcgtagttgctatcgcacttgatatcagaaaatatattgccaagaagtaaaatggttttacatcgataacaagcacgcctcgcgagcctgttaccgccaattgataaaagaggagctgccggcgggactttcgtgttccgggtcgcggctcctcttttggaataatcaaaatactcagcaggcatacatgatgcatgaataagaaagttggtgtaaatttggaggaaaacagattagaacacagcgggagcgaggttctggaaggcgacggcgcgcaggaacagaaaacggcagagagcggcagggagctgaccggggaagagcagaacttaaaaagactggaggaagagaatgagaggctccgccaggagatagagcgcgtcagaaatcttcctttaaaagagagactctatgacaaagtgcatgtgtcggtgagaacactcgatattttcatagcagtgatgataatcctcggaattattgttattgttcttgggatgagataagtcctaaagagataaattgattaaagatattcgccccgggagtgggaacactccacggggctttttttgcaggcggtgacctgtatgcggagcatgcaggttatcgtctgctgcatcgaaaagggcgtcccctatgcttcatcaggaggacctgcaaaggcactctttgtaatatcaataaaattacgtgcggcagatgaaagatagctgtcttttctgtaagcaatgacaaaatcccagaggttttcctgctctccaaccgagcagtacaggagagggcgggcggtatagaagaatttttcgcacatatcggtgcaaaagctcacaccaatgccggaggctacgatggacaaagcagtttccacactctgcagggttatggtctgcggacggatggaggaagcggacaggatccggtctgcaattttccgggtgcggaacttttcatcgaccaggaaaaaaagctcctggcccagcagatttatatccagccatgggtgctttttacccgctctctgctccaggcggcaggcaacctcagagataggcgaaatacacaggacgatttcctctttacagaccttttcgtacgccaaatcgggccggaacgtttcagatacggtgtagatagccaaatcgatctgaccgttttccatggcctgattcagggcagtgataccgtcttccataatattgatcttgtattggggatgcatccgcttaaaatccggcaggacattgggcagaacatagcggccacgggttggtgtaatgccgatggaaagagagcctctcgattcagaactgatatccgagagtgtattgttaagctgatggttcaaatccagaattttaaggcccgtttccacgtattgccggcctgcataagtcaagtgcattttattgtctatccggcagaaaagctttacattcaggcggttttccagattctgcagaaatttggaaagcgaaggctgggttatatcgagaaaacgggcagcaccggacagtgtctgatatttttcaattgccaggacatactgtatttcacggaaatccatacgattcccccctttctgaactatgtgcctcaagtatagcagataatacggtgaaaagcacgagcttgacggcgcgaaacgtcgtttttttgcgggggatgaacagatgctatagtttgaaactatagtttgtatgcggtaattctggatttacagctatggatggctgatgtatgattagggtatcaaacaataacagttcacgctgtctgaactgttacaatcaacatggcgcgccataaataaaaggggaggtatttcttgaaaaagggttatctgactacaactgataaggcccgtatctattatgaagacagaggaaacggaatcccggttttgttttttcccggacatatgtgtacatcacgtttttttgaaaaaaatgcggagtcgttatctcaggattaccgcgtgataacaatggatcccagagggttcggaaattcgtctaaggtgctccacggcaacgatgtggaacgcaactgcgatgatgttggagaactgatagaatatctgggtcttgaacatacggtgcttctgggatggtcgctggggggaagtgtcgtgatgatgtattttcacaaatatcatggactgcatctgagtgccgtgggactgatagactccgccctcttcccgttttcagaggcatcctggaatacttataacgccagggactataatatggacgaatggtgcggcaaatacggcgtctggctaaaaaacacagaggcgtattatgataattttatacgccgcattgacaggggaatagacccaaaagaacgggagctgttacagcgggaaatagaaaaaacaccgccctggattgggtttgccattcatacggactggtgccacacagacacggagcaatatttgaaggagcttaccgttcctgtccttcttgtctcaggcgaggatatcatgatgggacggcattataaagaacggatttgtgtttacagtgaactatatgaatttgagacgggcggacatgcaatgtttattacggaggatacgcggttcaacaggattctccggaatttcatagggaatgtcatagccggggagagagggggagagtcagaatgaaaacaatatcattggaaggagcctgcgatctgcatatccattcagctcctgatatcgtcgagaggatcgggaacgacgtggagattgccgccagagcaaaagaggccggtatgagggctattgtatttaagtcagtattggagccgacagtctccagagcctggcatacaatgcagcaggttgaaggaattaaggtattcggcggagtggtgctggattatcatgcaggcggcttaaatcccatggctgtggagccggccgtcaagatgggaggtaaaattgtctggctgccgacctatcatgcacttgggcatgaaatagcattcggggctatgggaagttttggctatacaacagagagcagccgcgcggacggactcgagccgctgaccattcttgatgcggagggaagaattaaaaatgaagtgatggaaatcatggaaatatgcaaggctgcagacattattttagctaccggacacattcatgcgtctgagacactgaaactcgcgcgggcggcaaaggagaatcattttaagaagctggtcgtaaaccatccgttttttaaagttccggatctcgatgttgcaacggtaggggagctggtgcatcttggcgcttatatggaattctgtgcgaatgagctttgcccgattccgcgcagctccaatttatacgactatactgcctgtctggaaaagtatggcgcggatccgtttattctggcttcggatgccgggcataaccgaaaaggatggccggccgaagaactcagaatttttgcgcagcttctcggttatgcgggggttaaggaggcgcagatttaccagatgctgaaggagaattataattttctgctgtcgctttcataagtacgggggagcacggactgtgatatgaaattttaacccggcagtaaaaactgttaacgttgaatagaaggagaggtacaatatgaaaaaaagattatggggaaaaatgacggtactcacactggcggcagctctgataatggccggaacggcaggctgcggttcggcagggaacgcgcagaaagcgggagagacaaaggcggccgcagccggagaggataacagcggcagggatgacggaggtaaggatgattcaggcacaaaaagtgcaggggcaggagaattcacggattttccggagatgacgattaagcttggacacggttcagctccggcagaggacgacccctaccatattctcgcaacgaattttaaaaacaatgtcgaggaagcgacgggaggaaaagtaaagattgaaattttcccgagcgggcagcttggaggcgagatggacagctatgaggggctgggaatgggaaccgttgacatgtgcattgccacaggcaacattttcggactctataataataagacgacgattctggatatgccgtttttgctcgagaatgaagccgcggctgaaaaacttctggacagtgatatggtatcggagctgcttgatgaattatcgcagaccacgggcgccgtccatcttggctggggttccggcgggttcaggaacatcttcaacaacatccgcccgattcacacgccgtccgatttaaacggtgtaaagctgagagttccggaaacaactatttttgtagatacattttcagctctcggggccaacgtaacaccgatgacttattcggaaacgtatacgggacttcagcagaaaacaattgatgggatcgaggttcccatcggaaacggatatacggtcggcttttatgaggtgtgtaaatatctttccatgacgagacatttttataacgcactgtccatcagcatcagccggaatctctatgatgggctgcctgtgcagctgcagcaggttttgagagacgccgcagtaaaggcgggacaggaacagaggctgtctgtggctgaaaatgaaggaaagcagctggaggcaatgaaagacgcgggaatcgaggttaatgagattggaaatattgaggatttcagaaagctggtaagacctatatacgataattataagaacaatatcagctcagaaaactacgaagaggctcttgaactgcttggaattgacgaataggggagattatatgaagaatggcataaggcgggcggcggatatatttctcaggctgtattcggcggccggtatcatatttcttgcacttgtgattataacaacatttcttcaggtgaccacaaggtactttttggatgcttccctgccgtggacggaggaaggggccaggtattcgtttatctggatgagcatgatgggagcgtcacttgccacacgtcatgccagccatgcaaccatcgatgtcgtcggtgattacattcatgggaaagccagggtgtaccattcggcgctggtccagacggcgatcattacagcggccaccctgattggtatttatggaatgcagatgataaaagtgatgatggtgcgttcgagcgcggccctggggattccgatggggtatgtgtactgtgcgattcccgcaggctgtgtggggattatcgtacagtgccttgcaaacctgacggagctttcggagcttgataagacggaggccgggaaaaaagagcggatggggaaggaggctgaggaatggctttgattttatttggactgatgtttggatttatgatggcgggaattcccattgcgttcagtattgcactggctacggcaggatttctggtatttaccggttccggttccctgattttgctggcacagcgttttttccttggaatggactcattcgttctcctggctgttccgctttttgtcatgacaggctatctgatggatcaatgcggtctttcgagaaggctgattgactgggtagagtgcatattcggaagaatccgggggagcgtcggagtggtaacaatcgtctcatgtgccatttttgccgctctggtcggctcaggtccggcaacgattgctgcaatcggcgcacttatgataccggcgctgagacagagcggctaccgtgaggaaacctctgccggacttgtggccgcaggaggcgcgctgggaccaatcatacctccgagtgtaggtatgattgtatacggatccacaatgaacctcagtatacctaaaatgtttatgtccgcaattataccgggtcttatgatggtggccgggctgatactcgtcaattttattatcgttaaaaagcagcatattccgccgagcgataaagtgttctcatcaaaagaaaagctgataagaacgtggaaagccatgccggctcttttacttccgttgatcattttgggcggcatatatggcggaattttcacgccgaccgaggcggctgtcgtctcagtggtctatggcctgctgacaggattctgcctgaaagagcttacacccgataagctcaggaagacaatggtttcgacaatcgaaacatcggctatgataacgctgattcttggcgtatcgaacctgttcggatggattcttgcgtatgctaagataccgcagacaattgctgcgcttgtaattccgattgtcaggacaaaatttatttacctgatagtcctctgcctgctgatgctgattgtgggggctttaatggagacgcttacaagcattgtaattctggctccgattcttgcaccgattggagtcgggcttggaattgacccgctgattgtcggaatggttttctgcctgagcctgataatcggagtcgtaacaccgccctttggagtaaacctgtttacggtggcatcgacgacgggattatcatttcgcagggtagtatccggagcagcgccgtttatcctttctctgattgccgtcgtgtttattgtggccgtttttccgcagatcctgatgtttcttccggggctgttgatgaaataatgcatggattccgggggacggcagccggattagatggatgagagcctgctgttctggtattcccggaaaaggtgacgtctctggtaaaccaggaaggcgggataaatgagtttgcatcctcctctgtctggaattctacctcagccagaacaagtccctcataatcgccgctgaaaatatcgagttcgattgtcagggaagtctccgggataggaatcagatagcgccgcttagacagaatttttccgtccgctttcttcagcagatgggcgtaggctttttcggtcagaggaaggttatattcttccctgaccatcttcccctttgatttataggtcagataaaacgtatcatcttcgcgtcggatacgtactacgggttcggtgcaaagataggcctgctcaatctgatgatacgggtattggcccggatcaaaggggagtgattctataaagtattttctttcaatttccatggatggttccttccttttctaaatgattatatttatcctcagacattgtggatacaatcagatattttccttctgtttcaggagattgtcgatgtttctgttatcgtgcctgtcaatctcacgcagttcatatcccgtatgaaatatcttttggcctattgccgagatacagggaactgttctttcttcgaattctgcgctgccgaaatattccggttcaaattcataccatccgccttctgggtcagcctgttttgccgtaccgttatcagaaagcagaaacgggtggatttttagttcattttaatatctgcccatataaatgtcaaacatcattctccttagtatccggattgtttaacggtgccgttaactatttcactccggatctcaaatcattatttaccaaaaacttgtatagctttctgaaaaaatatggtatactaaatttgtgttaaggttttcagccgtattatcaaggaggaaatgttatgtggtcaataggagatatgaagcgcaatggatgggcaaaggtaaagatatactactggtccgcttttgctgtaacactgatttgttcccttctgggcggcggagcaagccgcggcgggagtgtaaatacgtaccgcgaatacagggaggatatccatcacagcttcagcgggctaagtccggcggcactgcatatgattattaccacgttggttggcgtttttgccattgtgggaattgcggcactgctgtttaagattttcatcggtaatcctgttgtcgtaggaaagaaccgtttttttatggaaagcaggcagtcgcttcagtcagccggtatcggcaaggtgttctgggtcttcggatgcggaaactatatgaatgtggtaaagataatgtttctgagggatctttttaccgctctctggtcacttctgctggtaattccgggaatctacaaaggatatgaatatgcgatgattccctatatcctgtcggagaatccggaggcggacagccgcgatgtgtttgccgttacgaaggatatgatgaatggcaaccgttttcagctgtttctgctggaattatcgttcatcggctggtacctgctgggcgtgctattatgctgtgtgggcggtgttctggtggttccttatcaggaagcttccattgcggagctgtacagccatctgagaagctttatacatggtttcccgtttaacgggtacggtggagagcctgaagtgttttatgacaacggaaatcagggggacgacaggtatgataatcagaattacggcggtcacaatgaaaacaacgaaaattattatgatgacaggtattaaacgctcctgtcaaataaacaggtttcggttataaaatttatagaagaggtgacaacatggcagaggtatatgcatttttggcagatggatcggaagaagtggagtgtctggctgtagcggacgtcctggtacgtgccggaataaaggtgacgctggtatccatcagtaataacaaagaagttacaggttcccacggatttacaattgtggccgataccacgattggagagattgattttgaacaggcggatttgctgttcctgcctggcggcatgcccggtacaaagcgcctttccgaatgcaggccgctttgtgatgcgcttgtaaaggcgaatgaagagggccgccgtctggccgctgtctgcgcggcgccaagtgtcctgggcgggttaggcattctcaaaggaaagacggcaacctgctatcccggttttgaagggcattagcaggggcaaatgtgacaggcgatggcgtagtgaccgacgggaatgtgacaacggcaagagggctgggatatgcgctggatttggggctggagcttacaagactgctgctcggcgaaaaaacagcatcccatatcaagacggcaattcagtatgatcagatataaaggaaaataaacaattagagaacgggaaaagcaggggaaaaaccataaaaacccttgtattttcccgtattttctttggttttttctgaatttgtgctggtatttacagatggtatatgatataatgctatcttgaagtgtaacgcctaacgggtacggctgttcacatatataagcaaggaggaacccttaaaatgagtttacaggtagaaaaattagaaaacaacatggcgaagcttacgatcgaagttccggctgaggaattcgacgctgcaatcaagactgcttacaatcacaataaaggaaaattcaatattcctggtttcagaaaaggtaaagcaccgcaggccatgatcgaaaagatgtacggagcaggcattttttatgaagaggctgctaatgcagtaatcgacgcatcttatccaaaagcagcagaagagtgcgagaatgaaatcgtatcctctccggagatcgatgtaacacagattgaaaaaggaaaagcatttatttatacagcaaccgtagctatcaaaccggaagttacattgggtgagtataaaggagttgaagtagagaaggtaagtgcagaagtagcagacagcgatgttgatgcggagctggaggctgcccgtcacaagaacggaagactgatcacggttgaagacagaccggttgccgacggcgacaacacggtaatcgactttaagggcttcatcgacggaaaggcatttgacggaggcgaaggcattgattatcctctgacaatcggctctcattcctttatcgatacatttgaggagcagttaatcggtaagaaccttggcgataaatgtgagattgaggttacgttcccggaggagtaccacgctcctgaattagccggaaagcctgcaaaatttgaagtgacaattaaagagatcaagatgacggagcttcctgaattaaatgacgagttcgcaagtgaagtttctgattttgagactcttgctgaatataaagacgatatcagggcaaaactccaggataagaagaacagagaagcagctacagagaacgagaaccgtgttattgataaagtagttgagaatgcccagatggacatccctcaggctatgattgatacacaggcacgcggcatggtggaagattatgctcgcagactgcagagccagggcctgaacatcaacgattacatgaaatataccggaatgacagcagacaagctgatggagcagatggctccgcaggcacttaagagaatcaagacaagactcgttcttgaaaagattgtagagcttgagaacatccaggttaccgacgaagccgtttaccagcagattggcaagatggcaacatcctatcagatggaagccgagaagttaaacgaacttttaggtgagaaagaaaaagagcagattaaagaagatttaaaggttcaggaagcagtagatttactggtttcagaagcaaaactggtttaatcgccgtataatgaataagaaatgaaatttggtacagaattctatgggactggtagcctgtggggttctgtaccattgatatcggtgaaaagctcattacctggacttttcatcgttgattgtcggtgaaaggtccgcagagcgtacttttcatcgtttccattttgcagaacaggaggcattctatgagcttagtaccctatgtcattgaatccaccagccgcggagaacgttcctacgacattttttccaggctgttaaaagagagaattattttcctcggagaagaggtaaccgatacgtcagcagggcttattgtgtcacagcttctgttcctggagtctgaagatccgaataaggatattcacctctatatcaacagcccgggaggttccgtttcggcaggtctggcaatctatgatacgatgaattacatcaagtgtgatgtttccaccatctgtttcggcatggcggccagcatgggagcgtttctcttagcaggcggggccaaaggtaaacgattcgcccttccgaatgccgaggtcatgatccatcagccgtccggcggagcgcaggggcaggctacggagattcagattgtagctgaaaagattttacagacaaagaagaaattaaatgaaatcctggcagcaaatacaggccagccatatgaagtcattgagagagataccgacagagacaattatatgacagcacaggaagcaatggaatatggcttgattgaccgtgtcattgcaagccactaatacaaggaattgaggtgggcatatgccaggcagatctgatgataagattcgctgctctttttgcggcaaaacgcaggaccaggtcagaaaactgattgcaggttctaacgatgtttatatatgtgacgactgcatcgaactttgtgcagaaattctggaagaggaatttgcggatcagaatgacaagggtccggacttcagtgggattaacctgttaaagccgaaagagatcaaggaatttctggatgagtatgttgtgggccaggatgaggccaaaaaggtgctgtccgtagcagtctacaaccattacaaaagaatcacatccaagggaacacaggaggtggagcttcagaagagtaatatcctgatgctgggaccgaccggctcaggaaagacttatctggcgcagacgcttgccaagatcctgaatgtgccttttgccatcgcagatgccacaacactgacagaggccggctatgtcggcgaggatgtagagaatattctgctgaagattattcagtcagccgactatgatatcagcaaagccgaatatggtattgtctatatagacgagattgataagattaccaaaaaatcagaaaatgtttcgataacccgggatgtttccggcgaaggagtgcagcaggcgcttctgaagatactggagggtactgttgcgagtgttccgccgcagggcggaagaaagcatcctcagcaggagctgcttcagattgatacgacgaatattctctttatctgtggcggagcctttgacggactggaaaaaatcattgagaaccgtctgggagccggctctatcggctttaacgcagagattgtggataaacagaaccaggatatagatgaattattaaagcaggttatgcctcaggatttgactaaatttggtctgattccggagtttataggccgtgtcccggttacggtggcactgcgttccctgtcggaagacgcgcttgttaagattctttccgagccgaagaatgcgattatcaagcagtatcaggcattctttgatttggacggcgtaaagcttgaatttaccgaggaagcgctgaccgcgattgcccatctggcagtggagagaaagacaggagccagaggactgcgttccatcatggaatcgattatgatggatatcatgtatgagattccttcagattccagcattgggatctgcacagtcacgaaagaggcagtggagggaaaaagcgaaccggaactcgtatatcgtgaaaatacagtaccccgtaaatcatttacagggcgtttaaaaaaggataagacaggcgaaatagcctgatagggcctgtcatagccttaggcggaaggggtttgtaagatgaagcattgtcattttacagatccctttatcgttgaaggcggtaataagcctgcgaagcatgtttgttgccgtatatacagaacaggagacagaggatggaagataagaagatgatacttcctgcgatagcgctgagaggactcacagtgcttccgcagatgacaataaattttgatattatcaggggaaaatctatttccgctgttgagaaggctatggtaggcgatcagaaagttcttctcgtgacacagatgaagacggaggagatgaatcccgatatagaggaccttttccatgttggaaccatcggctttgtaaagcagcttgtaaagatgcctggcggaatggtgcgggttacggtagaaggacttgagaaagcggagcttctggaactggactgcggcggttcctccctgactgcaacagtggagccgcttggcgccatagaggatgacttaaacgtaatggagaaagaagccatgctgcgcatcgtgagggagaagctggaagaatacggaaagctcaatcagacagccgggaaagatttcctgctgactctgacctctattgcgggcctggaagaacttctgcatcagattgcggtacagtttccctgggattacgaggcaaggcagaaaattctggaatgtacctttttaagcgcaatgtatgagacggtactccagcttctgttgacggaaaccgaggtttaccgcatcaagaaagacttccagacaaaagtaaaggcggcaatcgataaaaaccagaaggattatatactgcgcgaacagatgcgggtaatccgggaagagcttggtgaggacagccccatatccgatgcggacgagctgaagaaacaattaaagggcattaaggctgataaagaaatcaaagaccgtatactaaaggaaatcaaccggttcaagggaatgccgtcgggaagccaggacgccaatgtactgagaacatatcttgagacggtattagagctgccctggaacaagatgacgaaggacaatacggatttaaaatatgcggagaaggtgctggaggaggatcattacggacttgaacaggtcaaagagagggtgcttgaatacctggcagtccgaatcctcacaaagaaaggttccagtccgattctctgtctggtcgggcctcccggaacaggaaagacatccattgcccgctccgttgccagagcgctgggaaagaagtatgtccggattagtctgggcggagttcacgacgaggctgaaatcaggggacacagaaaaacgtatgtcggagccatgcctggccggattgtggaggggattaagcacgcaggcgtgagtaatccgctgatgctcctggatgagattgacaaggtgagccgtgattataaaggggatacatcgtccgcgcttctcgaggttctggacagtgagcagaatatccatttccgcgatcattatgttgaacttccaatcaacctctccgaggtattgtttatcgctacagccaataccacacagacgattcccggaccgcttttagacaggatggaagtgatagaggtcaacagctatacggagaatgaaaaattctatatcggaaagaactacctgatccgaaaacagatggaaaagaacgggctgacgaaatcacagctgaccatcacgaatcccgcgctggagaagatcattcataactataccagggaagcgggtgtgagaaatctggagagaaggataggggacatttgccgcaaagcggcaagagagcttcttgagatggaaaagaagtcaatccgcataaccgataaaaacctggaaaaatatcttggccgcgagaaggttctgtttgatgatgccaatgaggaggatcagataggaatcgtcagaggccttgcatggaccagcgtcggcggcgatacgctgcagattgaggtcaatgtaatgcccggcaaggggaaccttcagatgaccggccagctcggcgatgtgatgaaggaatcagctcagacggccctgacctgggtgcgttccgtggcgtttgtgaaatatgcagttccggaagattattttgagacgcatgatatacatatccatattcccgagggagccgtgccgaaggatggtccgtctgcaggcattacgatggcggctgccatgctttctgccgtaacggagcgtctcgtatcggcaaagactgccatgaccggcgagattacattaaggggtcatgtgctgatgattggcgggctgaaggaaaagcttctggcagcaagaatggctcatattgaaaaggttcttgttccggagaggaacaggcctgatgtagaggagctgtcaaaagagatcactaagggtatggagattgtctatgtaaaagagatggaagaggtgatccgcgaggcatttgtaccggtgagcggactgaacgctccggaaacagctttggaggatatccaggcagaaacagcggacgaacctgctgccagagcggctgcagaagcggctgccgccgtatccgtgcacccaaaaagaaagggaaagtcatgataataaaagatgtaaacctggaaaccgtttgcggtatcaccagtaaaatgccggaaaacacacagccggaatttgcttttgcaggcaaatcaaatgtagggaaatcttctctgatcaattcgctgatgaaccgtaagtcctatgcacgtatctctgcacagccgggtaaaacacagacgattaatttctaccatatcaatgatgcgctctattatgtagatttgccgggctatggttatgcaagggccaatgtggaggtgaaggccaaatggggaaagatgatcgaggattatctgcaccagtccaagatgctccgatgtgttttccttctgattgatatccgccatgaaccatcctccaacgataagctgatgtatgactggattgtctcgcaggggtatcagccggtcattattgccacaaaggccgacaagattaagaggagccagctccaaaagcagatgaaaatactgaggaccggcctggagatcggaacagacgtactgatgattccgttttccgcagaaacaaagcagggacgggaagaaatctgggactatatagaaaaactggcggaggaataaaaaagtcatctgtcacagcactgagctccggctgtctaatcttatataaagaataagacagagaaggagaagcatatgaaaagtacagataacgacaggaaacggcagaagctggaagctctggcagaacaggcgaaagccggcagtaaggaagcggtggaagagattctcatagaaattcaggacatggtgtttaatctctccctgcgaatgctgggaaccattcatgatgcggaggatgcatcccaggagattttgattaaggtaatgacacatctgtccggtttcaggggagagagcgctttcacgacgtgggttttttccattgccacgaatcatctgctgaattataagaagcatatgtttgccaatgcgcctctcagctttgaattttacggggaagatattgtcaatgggaagacggaggatatccctgatatgagcggggagtcgataaaaatcttctggaagaggaactgaaaatgtcatgcaccaatgttatgctgcaatgtcttgacggggagagccgctgtatttacatactgggaaccatgttcaaagcagacagcagaattgcaggagaaatactgggaatgacgccggaagcgtacagacagaagctgtcacgcatcagaaggaaggtggcggaatttctaaaagaatactgcggtttggccggaggacggtgttcctgtaaaaagagggtcaattatgcaatcgcaacacaccgcattaatccgcagcggctggagtatcaggctttgtcaacggacggcatgcaggccagggattacatgcaggcaatggagcaggtagatgactgttcggttgtattttcggagctgccgatgtacggggtaacccaaacaacaaaagagatgctgagtggatttcttaattcagaactctgtatgtatattaaaaatgcataaataaaaacatatacaaaacccggtcaaaaggagcagatcacaccatgtcctttgaccgggtataaaatttcttaatcctgccggaacagtatcttacaaatcccatccatcacaaaatcatataattttcggatccattccatcgagcagaataataccagcactgctgcaaagaccgacataccggccaggtttccccagacactgccggcaagcggcaaaaatttcgctatcagcagatagagggccggggcggcgaaggaggagcctgcatagacaagaattgcattggtacctacttgggagaatatatttttcctgtccgggaaaagattgattaaagctcctatcatcagaatggcgatgagatagaagagggcgcggtaacctatcccctgggcggggacagcccaccgattcataagtaaaacggacattccgaaagctgtagggcagcaggacggatggtataaccgcggcggccaggatggcggcggcaattgcatgcggaatattcctgattttctctacgtgttctttcgtacataaaagacccagcacgaagaaaatcatcagggaaaagcaagctccccagccgatatggaacgcttcgtcgaagacaacgcttatgaacaaccctgcggcaaaggaaaagagtacgggaaatcggagctttttaagatccgctgcaaaaactttccatacaaaaacgcagaggagataataaaggggactgctgggaagcagaagcgacggcttaaacacatcggtattatagcttgccagtcccagcctgatgaagagcagggccgttataatatagagaagctgccagaaaatgtaaggaaccagtacatttctaaccgcgctgtttctggctttctccgtgtttttggtgaagtatccggtaataaaagcaaacatgggcatatgaaacagataaatatactgcatgagataccggtaaaggctgtcctggcgctcgatgtagggatctaaaatatgtccgatcactacaagaaagagcatcagggcttttaagttgtcaaacagatagtcgcgtttttccgtaagttttgaattcataatattaatcccgttgtttttcctgttctgtgatttttgattgtccctccggtaagacggtattatccgccttttgtccgatagcgcgtattttaagcttcaggtactgttttgccgtctggtaggccacgacaatcaggagtatgggcaggacaaagaggagaaaccatttgatttttaagataacgtattttctttttatccgtttaatatctttgtttatagttagtttcaatgtctcaattgcactgggcggtgcggccggttttccaatcataacgcctcctgtaaaatatccggtaagtctgcgtgaagccggaatcatgatattccggccccacgaatgttttcttattttattatttccctttccccggtgatttatcgctcatcagggatttcataatatatgcatagatttcctggcttctgtctctccagtggctgcacatcagttcagcctgttctttgtccggcacggagacgtcaatgccaaccaggacattctttccttctctgacctcacaatgaacgatataatcctgattagtggatttgtaaaaatcagaaacaagacccacttcatttcgcatgcggaagcggttttcctttaaatattcatccatatcctcaacgatggcgggagaaatcttcttgccgaagaattcgagcgtctcttcgccttccctggtaatctcgtatcgggtgctgttgtgcagcgtctgcatcttgatcaggcccgcttccagaagttcattgagggcctgctggagcgtgaagtaggtagtgtactcacgatccagaaagaagcctgacagctgtgcattcgtcagcgggaaattcacctgtttcagcatgtacaggttcatcagtttgtataaggtcataggttcggacagcatggaaatactcctttattctaaatggttaacgaagacaccttgcggaatactgcctgcagcagctaatatggtaacagttcatactgtctgaaatgttactgaatatgctctttaacagctctgcttaccacatcggccactctcggatcgaatgcggcaggaagaatattttcgtcgtttaagtcactgtcgtctacaagccccgcaattgcggctgccgcggccagtttcatctcctcggtgatggctgtggcacggccttccagggcgcctttaaaaataccggggaatatcaggacattgttgacctggttcgggaaatcagagcggcctgtgccgactaccctggcgcctgctgcctttgcaatatccggcataatctcgggcaccgggtttgccattgcaaaaagaattgcgtccctgttcatggaagaaaccatctcggcgctgacgataccgggggcggaaactccgacaaagatatcggcgcccttgagcgcgtcggccagcgttcctctctttccttccaggttggttacttccatcatcttttcctgcatccagttcaggccgtccatacccctggccagaatcccggctttgtcacagagcatgacattcctgaaaccataggtaagaagaagtttgctgatggcaattccggcgctgcctgcgccgtttacaaccacgcggcagtcctccctggttttgcccgtcaccttcagggcattgataataccagcgagaacgacgattgcagttccatgctggtcatcatgaaatacggggatgtccaggagttccttcaggcgttcctcaattttaaaacagcgcggggcggaaatgtcttccaggttaatccctccgaaagcaggagcgatacgcacaaccgtctcaatgatctcgtccgtatcctgtgtgtccaggcagataggaaaggcgttgacgccgccgaattctttgaagaggacagcttttccctccatgaccggcatggcagccagagggccgatattgccaagtccaaggactgcgctgccatcggaaacaacggcaacggtattcgccttgattgtgtatttataagcagcatcaggattctcggcaatcaccttacatggctcagccacgccaggtgtgtatgcgagggccagatcctctcttgagtttacttctgctttggatacagtgtcaattttaccgttccatttttcgtgcagcattagtgctttttcactgtttgtcattgtgatttcctcctgaacaaattctcttgtttctataatagcaattttacattcttaaatcaagaagataaatggatatttaactgaggttgggaggacgcgtccggaacggaccatgtccggtgtggtgagggggctctctgagtcttccgtccccgtgggaggttggtcgtggagggggaatccggccggaatgaattgctgcggggaccgtttgcactctttggagtgcgcatcggagtactaagctcgtgagggacctcgctaagcaccggcggactcccatgtcccctccgcaattgattccgcctacttcccccggcagggtttcgccggggacggaagactcaggtaaaggttttcgcggcaccggacatggtccgttccgggcgctgattgtctccagcctcaggggtgacgggaaccttgtcgctgccactacatatttccgatagataatagtctgtgcagtacggttattcctcgatctaaatggagatttaactgaggttggaggacgcgtccggaacggaccatgtccggtgtggtgagggagatgactgagtcttccattcccgtgggaagttggttgtggagggggaatccggccggaatgaattgctgcggggaccgtttgcactctttggagtgcgcaacagtgctaagctcgtgagggacctcgccaagcaccggcggactcccatgtcccctccgcaattgattccgcctacttccccgggtcagatttttgccagggacggaagactcaggcggaggttttcgcggcaccggacatggtccgttccgggcgctgattgtctctaaccttaaatggagagggccctgtcgcggccactacgtatttccggcaggttgatatcaaaccttccgctattctttcataaaggcgtattgtaggcatatcgtatgtttcgtacatggtagcactgagcggtaacgacaaggtcagccccccgcacttaacgcgtgagacattcagcggccgcaggccggcggacgggcgatacccccggcggagtctttcgtcccggcgaaaacccggccttggggcggaggggaagataaagtctgtggatgccgttgaaatccatcgctgattagcgaggtcccttacgagcttagcagcgcgatgcatttcacagagcgggagtgtgctccgcagactttatcttcgcccgcagtcccaactcacaacaatcttcccccgggacgaaagactcataaaacaatcccaccaccccgtccgctggccgttccggcggcgtcctcacctgcttaactaaatctccattaccgaattaagttgtaaaaagtcgatttatgtagtgtaattgcggacaaagtatgatagaataattaacaatgagagcgacagcaggtggtaagtatgaaagaaaggattaaccgtctggcgaagggaatcatcgattcggatcttccgaagatgatttggacgccggatgtgattgaggatacggtacgggttggcacgactgtgaagagggagatttttatcggcagtgagaacggcctgaatgtaaaagggttcgtctattcttccaatatccgcgtgcgcattccaaatgacaataatacgtttggaggactccggaatcatatagtttacgaagtggatacttcttttttatcggcaggagatgagatagaaggctctttttatcttgtgacaaactgcggggaaaaggagattccctatctgttccatgtagatctcgccacatcgggcagaatactcgggaacctgaatacggcaaaagactttttagaagtcgcggagcatgatatggacacggctctgcgccttttagagtaccaggattttacagaagcgccttttatgcaggacatgcatacgagggctctttacgacagccttaaaggctatgggagcaggcagaactttatggaagaattcctggtggcgctgggagttaagaaaccaatccgcctgatggttgaggaagataaaaaagtttatgacaatccgggcagacgtctggaggattttattgtaataagaagcgacacctggggatacatttatctggaagcttctgcggacggtgactttattcatctcccgaagaagagcgcgacccaggctgatttccaggatggaaccctgcggcttccttttaatattctgtcggaacgcctccatgtggggaaaaattacggagcgattctgattaagacggcgaggggaatcacgaaaattccggtggaagccacggttaacagctcccgtgatgcggaacgcgccgttttccgggaggagatgagggaatacctggaactgcgcctggagtatgagagcggaatgtatgaggacgctctgattctgaatcagatgcagaaggagctggatctgatgaagatgaccagtgagcagctgctcctgtctttgctgcaggcagagatctatgttctgacgggccgtcaggacaaggcctgcctgattctcgacgaagtaagggacagcgtcctgacaaaacggctggagcagaaggagctgtactgcttctatcaatatctgcaggtgaagatctggaatgacaaggagcagaaggactctctgatccgtctgcttcaaaagtactgttccgaggaggacagatacagaaatgattttatactctatctgatgctgctgaaagtgaatgaggaattatttgagaatccggttacggttctcatcagcatggagcaggagtttaaggacggctgtcacagcccgtttttatatgtggaatgcctgaagctgcttgaaaaggaaccgggatttttgaagaatatggccaggtttgaattatacgcactctatttcggcgctaaacgtggaatggtaagccgtgacctggctctggcggcggccaaagctttaaatggggcgaagggctttaaggaaatttatctgaagcttctttgccggctgtatgaaatgtatccggagcaggagattctttcctccgtctgctccatgatgataaaaggcaactgccggggaagccgctgctttgagtggtatgacaaagcgattaaagcatccgtcagcctgacccggctgtatgaatattttctgtattccctgccggaagattatgggaagctcctgccgcgggaagtacttttgtacttttcttattcgacggaactggacgcgcacagccgctgtgtgctttacagcaatatactggcctatacacagagggattccgatatttaccggctttatgaacgggcaatcgaacagtttgcgctggaacagctctttgccgggagaatcaacagccgtctggcagttatctacaaacacatgatctataaggaactgattgacccacagcttgccagggctctgcctgcggttcttaagtctaaccggattacctgccgtgacgccgcgatgcggtatgttgtggtgcgccatggcgaactgatgacagaggatgcttatccgctccaggatggaactgcatatgtaccactgttttcggagcgggatattattctgttccaggactccttcggcaaccggtacctgaatatacggtatgaaaaggtatcagccatggaggcggtggatgagctgctggaatgctgttttgaagtttatccggatcatcccgtactgtttgtaaacgcctgctatgaagcgatggagaaggaggaactgaacggggacaatgcagccctgctggaactggcagatcagaagatgaagctgcatccgctgttccgttcacggctcatgtccgcgattgtcaggtattataaaaagctggcggatgagagcggggatgggaacagaaacagcagcgtttcctatcttctctgccttgacaaggatgcgctgaccagggacgagcggagcggtgtctgcgagacgctgatccggcagaactattatacggaagcttatgagatgatctgccgctatggaattgaaggcatccagataaaacggcttctgaagctgtgtacgaagatggtactccagaacctgtttgacgaagacgaccgtcttcttcatctggcatatgtggtttttctggaagaaaaaagtgacagtgtgattctggactatctctgtgagcatttcaacggaaccgttgatcagatgtaccgcgtgctgatgcaggggattaaggagcacgtggagacgtatgacctggaagaacgcctggtagcgcagatgctctttaccggctgtacggaaaagatggatcgcgttttcgaactgtatgcgtccagaaagaagacgagtgaaaatgtggtgaaggcatacttcacggtgaaaagcatagaatatttcctttacaacaaaacgacggaggataaggtctttgcctatctggaggcagccgtcaataacagcgtggagaaggacaaggtgccggatatttacctgctggccctgaccagatattactccacacttccggcgcttcaggatgatcagctaaagctctgtcaggcggtaatcgacgttttaatcgaggccggcatgatatttgcctattttaaagatctggcaaaattcattgtcattcccggtaatattctggataaggaaattatagaatatcatggcaataaggagatcaggccatatctgcgccttcggattcttccggaagaggaggagtaccactacgaggatatgcgccctgtatacaaaggcatctatattcgtgagaaagttctgtttgagggggagatcatggaatatcagattcttgaggatgaaaatggggagaggaagacggtggaggaaggaagtatttcctgcaaggaagtaacgacgagaactttggggaaccgttttgcctgcctcaatgagatgagtctctctttggagcttaagaatgaggcggcgctcagggagcagatggaggaatacttgaaaaaggatgcggccgtttcagagctgtttacgttacagtaaggccggtgcaccggcaggtgaacggtatcttataatgtgcggccgtgttttgaaaggacttttagaaaatggacggacttgtaataggaatggatttgtgtgatacctacactcatatttcgtgtatggaaccggagcagacctgggtaatccctactgttgtctgcaagaataagaatgcagatgaatggtatgtggaggaggaagcttacgcccataccctggtcggtgacgggattatggaggataagctcctaacacaggttatgaaggacggtacggctacaatcggcggaatcaaatatgaggggatatatcttctgaaaatgttccttgagaaagccctggagctgccgaaaaaggcggccggcagccgggagatagccagtatagtgattgctgtaagctgcctggatgttaagctgatggacagtcttctttactgtgccgattatctgaagatcccgcgcgacagggtacatctgatcagccatacggaaagctttgtctactatgtgatgagccagaagcgggaggtctggagcaatcaggtgggaatgtttgacctgacgaaccagagcctgcgctattatgagctgaaggtccagagaggacttcgccagatgcaggtggtagccgattgtgagaacctggaggagggcttccatctcgatgtgctggataacacggcaggcgccaggctggcggatcggattctctgttcctgtgcggaccgtattcttcaaaagcgccttttttctgccattgtactgaccggaaagggttttgagaatacggaatgggcgccggagtttatgaagcaggtgtgcagccgccggaggcttttcgtggagaacagccttttttccaaaggcgcgctcatgaaagctgccgattacctccaggaaaaatcatcgtattcatttatctgtatttgtgaaggcaggcttaagacaacggtttccgtcaaggtgctgaatcacgataaagaaggacagctcgttttggcggcggccggagataactggtatgaggcgaagagtacggtggattttattgtcaccggtaatcctgaggtggaatttaccatttcacccctcgatcccaagaagaaaaaactggtaaagattggcctggaggactttccgaagcggcctgacagaacgacaaagatagagctttcactgggcttttccgatgaccgcaccatggtagccgtgataaaagataaagggtttggtgaaatttttcccgctgaggatgttatgataaaacaagaggttggattatgagtttgatactttgcagacatgagccggttagacatccatattatatagaacgcctgggaatccatattgcttcttcccaggagctttgctatgtgatttataataatcccctgctcgctatggaaggcctgattaatgataatctgatcacatttatacggacggaattggatatggcattcctggcagggaagctggatgtctgcaagaagagcggggaagacccggatgaaatgatttttatcattcttcaggagtgctattattatacggccagggagataggcaagttccggcagaaaatagcgtcctacaagaagatgagcgctgccgaacttacaaaggagacggcagacttttatttcaggctgaaacagtacggcacggccgtgatttattacgaaaagattctggatgactggcggattaaatctctcagcgatgaatttaccgcaaaaatatggaataatatcggagcctcctacgccggaatattctggtttgaaaaggcgatgtcggcatttgatatgtcatataattttcaaaaaaacagggagacgcttaagaaaatataccagctgaccctcctgaatccggagcttacactgaaggagcgctatgaatctctgataacccgccagcagaaggacgagtggaaagaagaattcgagaagctgacgcaggcggcatcggaggacagaaagatcagggaggtagaggaattgtttgacaaggatcctatcaaacggatttcaggcgccgggaagctgcttgcgaaatggaagcaggattacagaaaaatgatctagaaaagtaacaggaatggggagaagttattcgatgaaagaactgaaaggatctgtatatgccgtcatttcagctataatatttggctgcatgccgattgtggcaaagtatctttacgcggagggctgtaatcctgtcagccttgtagtataccgttacagccttgcgctgccggttctgctgatactggcattgagggaacaggggaaagatgaacgcgaaagaaaagcagcaggagagccgtccaagcgtgattcaggaatgaggattacgatgtcccagctccgccagtttattatactgagcacaggattttcactgaccccgatcctgctgttttcctcttataattacatatcgagcggaagtgctacgacgattcatttcagttatccggtgcttgtaattctggcctctgtctttatctttaaggagaaggccacctggacgaagattgcttcggtggtattctgcgtcatcggcttggttcttttttatgaaccggggcaggcgaacggagcggccggaattcttctggcgctggcgtccggtgtcacttatacattttatatgatgtattttgaacgcagcacgctgaaattcatgaaaccattcaagacgaatttctacatgtcgctcgtatcggcagtgatggtatttgtcctttctctggcgaccggaacttttgtgctgtttcattccatacgggggtgggcggcagctttcggtttctctttcatgctgattgttgtagcctgcgttctcttccagcttggcattgccatgacaggcgcacagaaaacggcaatactaagcacctttgagccgcttaccagtatagtgctgggagtagtctgcttcggtgaagcagtggggattaagacagggattggcgtggcatttattttggcatcggttatctcgatcaccctgtttggacggaaaaacgcctgaggctggcttgaaccgcttgctctgcgtttatactcctgcttttggccggttattttctctcaccctggcattcagttgtctgattcgtctctttgttaccgaatacagcgaaaaccaaatcacaaaatatatggcaaaaaagagcgcgaagtagagagatatccccaataaactatgctccatccatcgcaggaggtatgcgatggggaaggttgcggtggagccaatgattaggtgggttattgtctgacgcagcagactccagttttctttttcccaaaccacggaggagcctgcccatatggcgccatagataagtgagcatactgactgaagcaggacggcattaatttccgaaccgcaaagggcggtaagctccggcacgacggcgtgaaagcggccgtcgccgataaacagggaaataataatcgtgatggcataactgatggcaagacctgtcggagcgccaaacagacagcggtaaaacaaattttttttcatattgaccacctcataatcctaataattgtttgattttggcgatgtagcgccgtgaaacataagtaaccgcgccatttgtcagggatacgcaaatcgtaccggtgaagctcatatcgaactcctctatttttctcagattaatgatttccgaatttgaaatacgaacaaagaactttctgtctaacctgtcttcaagctcatacaggcgcagccggacctggtattcatcgtcttctgtcacggcgaaaaccttgctgtttgccgcataaatgcggattattttttcttgctccagcagagagactgtctcctttttgaagccggcaaggagacggggcttttcttctgccagacgctgcatcaattctgatatttcatctgtgattttatttgtcgtgatgattattcttggctcggacagagtttcatcaattttgatctcaatctgcattcccttcacccccttttcaatacagttatagtatagcgaacttacaaatcagaagccactgttttgcgatagatggtcgttttagacgcataagcggtaattgtctccgcacttttttaccggcttataagctgtccgatattcttaataagaacggagatcgtcccgtcttcgttggtaatgaattccacgtggtccggattccggtattcttccattggaatggagatttcaatacccgtatctgtggtgagatgctgtttctggaatttcttgattgtctgctcgctctttggctgaactgtctcgtaggacatattgtacttgtccagcttttcgtcaagctctacctgcatctcaggactgtccggaaaaatcttctcttttattgtggcgacttttatctcgcctgcctcttcaagctccgtacaaagaacattctttatttccattctgcgttccggcgcttcgtcgccgtaatactttttattgacctgttccacggccctcgttacaatatccagcttcgatttttgtgacagcggtgcgtggcattccaggaacagctccgaaaaataaaagcgcttttcgccgttaacctcatattttttctcggtcaggagaatgcttccgtcggagaggttcacaatgaaggcctcggacagcttctgtccctgagccggcagcagagcgcgctgaagaataatatcattgcggttacctccttccgcttcgcgggtggcatgggtatatgaggtcttgtaattcatcttaagaaagcccagataatcgcagccttcgcagctgaagacgagaatggcaatgtcggctgccggaatatcgatgttggaattcatgatatcatagagattctctgcaagctgcttgctggtttccacgaaattatcgggtgtacagttttcaatcagctctttcagcggggagctgtcggagaagctgcactgtttgatatcatcgctctcggtgattttttcaatatgcgcctttaagaaatctgaaaaatcagggccgatttccatcgcctggtcggaaagcaccggtatccctaccgaagaatccaggatatggatgatggctgctttcatgattatatcgtcacttttcattatgtagttatcctccttttcaaacatgctctagtattatagcggaagggaaaggaaaattcaacaaaaggatgagaagggagaaccagggttactgttcacacggttgttttccgtgaggtattattgttcgcaccgcgccgcttttgggcggggtgtgaactgtaacggacccggtccgttcttctgacactgattgtcttaacccccagctcacagcgcttctccctggctgatacaggataaggccctccatgacaaaatacggatcatggaaggccttataaaacgttacgctatattatgaatcaagtcactaatctaaaaattctatcacatccctgacattcccgtcatccgtataggtaaacttcaccttttcatctgctttcaggaacgggagcagctccgatacggatatctctgccgtgtaaacctggcggcttcccttcagcgtgaagtagtagcaggtatttcctccaactacggcgctttcaatcgcgtcaacggtgccggagatttcagtgccttccctgatttcaggaattgccacatcttccaggttcaaggcggtgcgataattgcgcttagcctcgtcaatcgtctgcccggtaccgacaatctggtactgttccacatcgacaaacgcatacatcttcacgagtccggccgcatccttcagcgaaatgaaataggtcggcctgtcggatatattcaaaagaagcgggaaggtagctttatagttcagatgctgtacctgtccctgggccgattccatcgcggagagttcggtggctccgggaacggcataaaatttagtatccttcgtccttaagttaaccagaacaaatccgatattggattcatccgatgtaacggagctcatacccgtatacagataaacgtcatcgtcaatcgccaggtaattatatccgtaggtggtacggcgcacattcctctgtccgaaaatggagttaatgtaaccgttctggaaccgcccgttatcatcgagctgttcgataatcagattggaatcatagagctggtcaatccactggggaacatcagccttatcgtagtaagcggattcaccggttacggcattgacgagtaccgcgccgtcaatatcttttccattccaccagccgatccggtatgcgatggttggagccacccagtagggcgtgccttcatcatcgatttcaaaagagacggtctcaaacatcttagtcggatatttaaaacggatatagcggtaaatattgcggaagaaatactcggtcgtggaatatttcatcccggagtcaagccagacgaggtttgtgtcctgatttaccatgtctacggcaatgtacgccggaagtccggttctcatattatagagccatttcaccggatccgcataggacagaggcgtaacacggtaaggaatacctttgtagttaatctgtgtatagttattcagaatttcaaactgggagacgagttccgtcatctcacccagctttttgcttccgagtcttgaagccgtatccttgtctaccacaggtatctgggacatgttgagttccgatacatcggtggtaaagttaccgtcggtgatggtaatgagatcgcggtaccttgcggcattgaataccttaagtcccagcgcggaagccaggatcatgaaagcgaccagaaccgcaatggcgataaagccgaattttaacggtttccccatattgatcttgttcttttcctcgctctgtaccttgcggaatacgacctggcccgtcacaggatctctggtgagttccataccccggccggaactgagattctggataaaatccttgacataggtgagaaagttgaccaccaggaaaatcacaatacatgaaatgagataaataatgaaatttctatctctgaggttaatggccggcagcatagaataaaagagtaagaacatgagaacggccgatataataatcctggttaaaatcgatgaagctttttttaatttcataaattcctcctttagctgatacagcctattgtatccagaaatggtgagaaaatcaaggtatattcgcagaatagcagagtatgcacggaaatttcgggtataggcggtgcaataggccctgaaattgcagctttccgccgatatatgtcataaaacgttttaccgggcatgaagaatacaggatgtaaggatggttgcaatggatagtgtctgataaattacataataaaatataattaataaaaaatattgcactcactatattgatgtgatataattctcaataaagaactattctttatgtgtactttaattaaagaacgccggttgtattgtgtgctttaattggaaacccaagttttccgcgtaagcggaaccagttgaggaaactcagaaaggatgattgttatggcagaatttgaactgtcgtcagtggaaaaagccgtgaagggacacctcccaaaagctttagagctgagccgttccctgagagagcatccggaacttccggatcaggaatttgaatccagcagaaaaatggtggagatcctgaaggcggcaggctttgaggttacatacccatatgccggatatgagactgcattccatgctctctttgataatggcgacggcccggaagtggcaattctgacggagtacgatgcacttccggaaataggacatggctgcgggcacaacctgcatggttcactctccatactgacgggacttgcacttaaggatctgaaggattcctataaaggaaagctgcatgtgatcggcacccccgcggaggaggagaacggagcgaagataggtatggccgcccagggcatttttgacaatatgtccctggccatgatgatgcacagctggtcgggaggcaagtgccgggccgatatggacgcgctgagcctgcggtgctatttcgtggaattttacggccaggcagctcatgcggttgccgcgccgtgggaaggcagaagcgctctggcggcggccagaaagttcctggatctgattgatgcacggcgtgaatgctttaccccggatgtccatgtgaacagcatcgtggtagatggaggaaaagcacccaacattattccggattatgtgaagctcagaatggaattcaggacagcaacaatgaaatccatgggcgccgtagacgagatggtgaaaaagtgtgcggacggagccgcgcttgccctggactgcgccgtaaaattcacaacggtattcgagtttgccgacatggtgcggaacatggcgttggaagaggaggtggtacgacagtttgaaagctttggcatgcccacaacaggcgtggaggccgccagcggttcctccgatgtgggaaatgtcagctaccggtgtccggccatacagccgctgctggccatcacggacgaagattatgcattgcatacggcggcattcagagatgccactgctttgccgcaggcggagcaggcaatggaaaagggggcatgtatcctggctttgatggctcttaagatatttaatgatgaagcgttcagaaacagggtttatgcggagtttcaggagcaggtggagaagaggagataacctggtctgtctaagagaggagagattatatgagtagtgggtctgtaaccaaaaagaaaaaatttaaaatgcctcatatttatgtacttcttattactataatcataatttgtgcgattgcatcctggatcctcccggccggagagtttgaccgggcgctcaacgatgccggaagggaaatggtagttccgggtacatatcacataatcgagtccacaccggtaggcttcttcacccttgttcagtcaatttataacggtaccgtcgatgcggcaggcgtaactttcttcgtttttatttcttatgcctccatcggcctgattatcgccagcggagcttttaacggccttgtcgccagtatgctcagaatattaaagggatccgcacgcgccgttattatccctgtatttatcacactgataggatgcgccagctcaaccatcggcgtatttgaggaaatgttcccgtttattccgattttcgtaggaatcgccatagccatggggtatgatgccattgtcggcctggccattgtcgctctgggtaccggtatcggctacagcggagctgtcatgaatccgttcacggtcggcatggcgcagagtattgccgatatccctcagatgtcgggcgccggttacaggattatatgtcatgcagttatgattgcagtcgcttcattttttgtggtccggtatgcattaaagatccaggccgacccgacaaagagccttgtttacggcgatgatttcagcagtcttacgatggattcggatcacattgaaaacaagcagtttggcatcagggagaaattggtccttgcgactctcgttgccggtattgtggtaattgtatggggaacaaagacaaaaggctggtattttgcagaactgagtgccgtattccttttgatgggtctcgtaagcggttttattatgggctggggaccgaatgagatagcggagaaagtggcaaagagcttctccgaaattgccgttgcctgtatgatgataggtatagcccgcggtattctggtggttctccaggcaggccacattattgacacgatcgtatattacctttctatcccgctttcaaatcttccgggagccatctcggcgattgcaatgttcctggttcagaccggaatcaacttcttcatcccgtccggttccggccaggcggtgacgagcatgccgattatggcgcccctggcagacctgattggcatctccagacagtcggctgtattggcattccagttcggcgacggcctttccaacatcgcatggcctacggccatgacaccaattatctgcggtattgcaggagtaaagattgagaagtggtggaaatggtttgttccgatttttatcgctctcgttataacccagagtatcctgatggctgtatctgtagttgtctggtaactcaaacaaacagcccggagcagtttccgggctgtttgcttaactgatggcggaaatgaattttaagacacgctctaaggcagtacggccgctttatacgggcacgccggctgcccgggccaggttcagagtccgcacggcaccgtcatagaatgcgatatccaccatttttccatctacggtaaagacgccgattccctgctccttctgttcgtcgattgccctgataagcttttgggcataaataatttccttttctgacggggtgaagatctcatttacaattgcaatctgctttggattaataatcgattttccgtcaaatcccatcatgtgaatagtctcgacatcttttctgaaaccttccatatcatccaggttcgtataaaccgtatcaaaacattgaattttagcagccctggctgccaggatcataagctgcctggcgcctgccagttccacccctgtccctgtaatcgaagtctggagatccttcgtgaaatcgcctccgctgagcgcaattccgaataaacggccggaggaacggcagatttccagggcgtttaatacgcctgcggcggattccagggccgccatcagcagagtgctgccttcggggcgtccgaattcctgttctgctgccagtacggcttcttcagcggccttcacgtctgccgcagattctgttttggcaatccggattgcgtccgcgcctgcagccacgcagacccggatatcttctctccagtaaggcgtatccagtccgttgattcgtacaacacgctccacaccgcggtagtcaatttccttcagggcatggtacagcgaatatcgggctgaatccttctgattcgcggcgaccgcatcctccagatccaatatgatggaatccggctcataaatatagggatctttaatcaggccgggcttttggcaattcagaaacatcatggttcttctaagtctgtttttatccggattcatcgaatggcacctccccagggcagctgttccgtgatatggcaggagcggaagacggcgcattccactcttgctttcagggtgcagtcgagagcgcccttatctatcacgctgatttttacatttttaacatcaaggcgttccagcgtttcaagaattgtctttctgatctgctttccatactggtttatcacgctgctttccaatataagttcaattcctttagccgcaggttccaccatcacctgggcgtcgctggactccagcgtgccggcgatagccgtattcactatttccataaaaacctcctcctgtaatcgtctgtgttatatttattgtttcatttactgtgattatactgaaaagtatccggaaccgccaatattaagattagatatcagatattagaaaaactgatagggtgcatgtgggaatccatattgttcaaatcaaaaattatctgatagaatgaattcatcgaagaggccggaatacatggggaaacggccgcttaatgacaagaagaaaaagaggaggagttcaaatgaaaaaaagagtagcagcactaacaatggcagccgttatggcagtatcagcagcgggctgcagtggcggggcgaaagaatccggttcccagacagaaacaaaagaagcgtcggcgcagtcagacaaagacagcggggcgaaggaagaggaaagcacctggccgcagggtgaaactcttacgattattgttccgttcaaagcaggcggaagcgcagatttgatggtcagaggcattctgccgtattgggaggaaacagccgggtgtacatttgtggtggagaaccgggaaggcgcatccacgatggtcggttccgtatattaccagaccttgccggcggacggcaccagcatctactgcggaacgcagacatatctgagcggcaaccaggtattgcagggggcgacctatgatattaccgattttgatcttatcaatatgcagcagatcgacccgacaacgattaccgtgctggacacttcaccttataactctattgaagacttgatcaaagccattcaggaaaatccgggcaaaatcaaagtcgggctgacggccggaggagcaggctccattctgcttggaatcctgacggaggcatttgatctggattataagaccatctattatgacagcggcaatgatttccggactgccctgatgggaggccatattgattttatcacaggctccgctaacggcgatatggggcttggcgatcaggcaaaggttctggccgtctgcggctctgagaggaatgcaatctggccggatacgccctgttttgatgaagtttatccggatttgaaaattccgggctccctcggctcctgccgtctttttgccctgcaaaaagggtgaaggaaaactatccggagcggtatgagaagctggttgaaacttataaagcggcttttgaaaatccggaataccagaagttcctggaatccggcggggaactggccgtctcggcgtaccgcggcccggaggagagcaacaggctgaatctgcagcttcatgagcttgtagtacagtatcaggactggctgaaagaagaataacaggcaacggaacgataacctgtacgttccgcgcacaggtcatcgtattcaatgaatctgcccggtatccatggatgaaggataccgggcagtccagacagaagagaaagaatggacggaaaaggaggactgagaatgggttcgctcataaaaaaactggcgcttcccgcaatcgttttactctggtcggcagcctactttattgaagttgccggttacagtaagaaaaaccagtatttgatcaaaccggtatttatcgtgatggtcattttgtttgtggtcaatacatttaccgatataagggagtggagaagagaacaggaatcaggaaagggagcttcgcagatatcgcaggaagaaaagcaggtactgcttaaatcattattggtagtggtctctatggcagtttatgtgattttaatgcctcatattggttttatcattacaacggcggttttgctggcagtgctgctgctgattatgcaggtgcgcgagttcctgcctttgattttgctgccgcttattgtaaccgggattttatatgctgtgtttaaaacaggactgcatattccgctcccggccggatttttaggtttttagggagggcaaaagatgcaacatttcattgaaggattttcggtaatatttcaaatgcagtatctgttgtatatgttcggcggtgtggggattggactaatcctgggatgcctgccgggcctgacgggaagtatggggatcgcactgatgctgcctttcacatacaagatgccgccgcttacggcgcttgttttcctgctttctatttacacgggaggtttgtttggaggcgcagttacggctgttatgattaatacacccggatccaccgccaatatggtcacaatgctggacgggtatccgatgaataaaaggggagagggcggaaaagcgctcggaattgccctgatgagttctgtaatcggcgggctgataggctgtattttcttattgttcgcaacgaaaccactggctacgttgtcactgaaattcggtccggcggaaatgttcatggtggcgatattcggactgagctgtgtgggcagtctcgcaaagaatacactgaaaagcgtgtatgcaggcctgtttggcattctgctcggaacaattggaatgagttctcttgggactatccggggaacctatggaaacatgtttctgatggacggtattccaatggttccggccctgattgggttcctggccatgccggagattatcaatctggcaggaaaaaagatgatgacagataataacgggaatcactcaaccggtttcagggcagttctttcaggctttaaagaggtgctgaaacgccctgtgcaggcggtgctgtgttcacttttaggcgtggttatcggaatcatgccggccgcaggcgcagccgtcgctggaatgatggggtacaaccagtcaaaacagtggtgtaaaagaggggaccagtttggaactggcattccggagggcgtaattgcctgtgagactgccaacaacgcatccgagggcggagcgctggcgactctgttcgtattgggcattcccggttcggcttctactgccatgatgctcggcgctctggtacttcagggatggaatccgggaccgaagctgtttattgatcatgaggacgtcatttatatggccttttcttccctgttcatacagcagtttgtcatgctgattttgggactggtactatgcgcctttgccgcatatattgtgaaagtgccgacaaaatacctggttccctgtattcttgtgctgacccttctgggagcgttctctaacaggaatacgctctttgatgcaggacttatgctgctgtttggtgtgataggatgggcgatgaaaaaagcagaattcccgatcatgcctttgatactgggacttctgcttggaaaaacggctgataatgaattgctccggacaatagaatcctatgacagtttctggcagattttcaccaggccgatcgttctgattctggcggtagccagtatcgcctgtatctttggccccatgctggcaaagaagaggaaggcaaaggcttaagacatgacggaaaactcaagtgcgctctaaggcacctgtttaccgggagccagcagccgcgaggccatctccacaaacgccatggtggctttcgaacggtaggtattgggagggaacgcaaagaccagcttgcggtaaagcccttccctgccgatggataagtaggacagcttatagcttccgttatagactggatggatgtaggagcctgccataaaggccagccccagcccctgctcggcaaggcggatactggtctccgggttctgggttttctggatgacatgcggtttacagccatatttttcaaactggctttccgccagagtgaacagccgctgtcctttcgaaagcaggataaagggctcatccatcacgtcttcaaaatttatatagctgcggccggtttcctcatcgcgcattgcccgtttgagaacaggggattccctgttgacagccagatagacctcttcttcgtaggcatcctcggtgggcagctttttatttatcagtggataagttaaaagagcaacgtctatcacctggcgaagcagataatcctccagagtctgggtgttggcttccactgtatgtatcgtaatctgagggtatttcgcatagaaagccggcaggatgtcaggcagtacgaacgaaccccggaacggcgtcaatcccagggagaccttgccggtggagagattggcaatatcccacagctcattttgcaaattgttgccgatggcgactatctggtgcgcggcttcgaggacacgttctcccgcttcggtgggccgcatccccgtagaggtgcgcacgaacagtgagcagccgatggccgcctcgtagctttttagaaactggcttaaggaggactggctgacgaaaagcttttcagcggctttcgacaggctgccctcctcggcgatagttaggatgttggttaattcccggaactccatgtgagcgttgacctcctttgcgtgaaaacaccctgcggctcgtggttgtgattgtaagtttaacactggttcgtcaatatgcacaaaaaatgttcgaaattgtcgaataatatttacagataatcatatattgtttatcagcgtaagtcaagaaaaaataaatggaaaaaaatagtatcattatttagccgtaaaagttcagacagcatgaactcttacatttagcaacagattgttggaggatagatagcatgattaacaaggttggaagagatataccggatgaaattttagagcggtacgggaaagaagggtataacggcccggattaccgcaacggtacctattatgtgaaggctgcgccgagggtacgcagccgcatggaaggttccggaaagattcttccctccctgcaggaggcattgcttaaatgcggcgtcagggacggcatggttctttcatttcatcaccatttccgtgatggagactatgtggtgaatctggtgatggagacggtggcggccctggggattaaagacattacgatatgcgccagttccctgggggcggcccatgatccggtagcgaagctgatagaggagggagttgtaaccggaatccagtcgtcgggagtgcgcggaaagataggggaggccatatcgggaggcaggcttaaaaatccggccgtgatccgctcccacggaggaagggtgagggcgattgaggaaggcgacgtccatatcgatatagcatttatcggcgcgtccaccagtgatgaatacgggaatgccaggggcgtgggaggcaagagcaactgcggcgttttatcctactccatggttgacgccaaatatgcggatcatgtggtggtggtgaccgactgcctggtggaatatcccaaccttccggccagtatatcacaggtagatgtggattatgtggtggaggttgaggcaattggcaaccccgataaaattgtcagcaatgttgtacgcatgacaaatgacgtaagagagcttaagatggcggaatactgtgccagggttatcgcaaaagctccttttttcaaagatggattttccttccagacgggggcggcggtgcagctctcgctgtgaacagaatgctgcggccctatctggaagaaaaaaatatcaggatgggatttgccatcggcgggattacacagcctatgtgcgagcttttagaagagggctttgtgcgcaggattgtggatgcccagtgctttgatgcggcctcggtgaagtcggttgaaaacgaccccggacattttgaaatatccacatccgaatacgctaacccgatgaataagggcgcttacgtcaaccgtctggactatgtggttcttggagcgcttgagatcgatttggactttaatgtcaatgtggtaaccggttccgacggagtagtgcggggggctcccggcggccatccggatacctcggcaggctccaattgttccattatcgtagcgcctctgctgcgaagccgtatcccgacggtctgtgacagggtagtgacggtgacgacaccgggggagtgcgtggatgtgcttgttaccgattatggcatagcggtcaatcctttgagacaggatctgcttggggccttccgggaagcaggacttcccctgaagacgattgaggagcttcgcgatatcgcttattcgatcgtcggagagccggaaccgctggaatttggggagcgggtggtaggaattgtggagagccgggatgggacaattctggacgtgataaggcagataaaagactagggtctgtttgaaaatacataaataacaaggtggaatttgtgatgagaaaagaagataagggagtctatctggtaaatggaaaccggattgtaagcagcgaagagaaacatctcctgaccggcatcggtttcaccgaggcggagcttaagacggcaaaagaggggacaatggcctggtcgatactgaaggcccataatacttcatcggatatggagaacctgaggctgaaatttgatgcgcttgtaagccatgacatgacatatatgggagtgctgcagacggcaattgcctgcggtgtggaagaatttccgatcccctttgtccttacaaactgtcataacagcctgtgtacgcttggaggaactctgaacgaggatgatcatctctttgggatgggggcagtaaaaaaatatggaggaatcatggttccggcccaccaggcggttcttcaccaatatatcagagagcagctggccgggggcggaaaaatgattctgggggcggacagccataccagatacggcgcgctgggaacaatggcagttggggaaggcgccggcgagctggtgaaacagcttttgtgccgcacctatgatctggcaaggccccctgtggtactggtatacatgaagggaacgcctgcggccggagtgggtccgcaggatgtggccctggatataatacggaatgtattttctgatggatttgtaaaaaacagaatcatggaatttgcaggcccgggaattgcaggcctcagcatggacttcaggaacggaatcgatgtaatgacgacggaatcctcctgcgtttccacgatttggcagacggacagtacggtcaaagactggctttccgtacataaaagagagaatgaataccgggaaatccgtccgtcccgacttgcctactacgactatctgctggaggtggatctcggtgaggtgaagccgatgattgcccttcccttccatccgagcaatgcctatacaatcgaagaggtgaatgaaaatcccgaagatatcctgcggctgacagaggaaaactgcaatgcgcagatgaaggaattcggcctgaagatggatttgaggagcaagattgaacatggccgactgagagtggatcagggagtaatcgcgggctgtgcgggcggaatgtttgaaaatatcagcaaagccgcggatattctcaaaggcagttccatcggaaacgacatattccagctgaatgtttatccggccagccagccggtattccaggaagtggtggagaaggggatagcctcaggcctgctcgaggcgggagccaatcttcgctccgccttctgcggcccctgcttcggggccggtgatgtcccgtttaacggcggattttcaatacgccatacaacgcggaacttctcaaaccgtgaaggctccagaccaaagagcggccagcttgcatcggttgcattaatggacgcgctgagcatcgccgcaacggcagccaataaaggattcctgacaccggcgacgcagtgggagggaagcttcacaaagcatcagtatcattttaatccgaagctgtatgagaacagggtgctgaactgttttggtaagccggacaagagcgtggaactggtaaaagggccgaatatcaaggatatccctgtaataccgggactgaaggaggatttgctgctcaaggtttccgccgtgcttaccgatccggtgacgacgactgatgaactgattccgggaggggaaagctcttcctaccgctcaaaccttttaaaactggctgaatatgccctgtcggcccgggaaccgcagtacgtgggccgctgcaaggaaatacagaagtgggagtcggcacttatggccggagataatccatttgaaacggaggaggagcttaagacggcagcagaatacctgaaaagccggggactgtctttacagacagacaaaacctgcgtcggaagcgtcctgtatgccaataagccgggagacggttcggcaagggagtatgcggcaacctgccagcgggtgattggcggatgggccaatatctgccgtgaatacgccaccaaacgataccgctcaaacctgattaactggggcatcctgccgtttacctttcagggggagccatgctttaaaacgggaagccttttatgggttcccggcatcagaagggttcttgaatccggcgggagtgaagcagaggcatttgtgattccggaaagccgggaggaaaagccggaaaaaatcacgctttccctcggaacgctgggggagacggagcgccgcatcctgctggagggatgtctgattaattattataaatgcgggggccggtaaggctctggacataggacagacaaaaggagactcatcatcaaagtctccttttgtatcttttcactgcagtcaacggcagtttttaccgtttctgcgcataatttacagccgttttgcctgaggctgaacggtaactttaaagtttgaaatccagacggtaaatgttgacgggacggcctttgaccccattcctttttttgccgcataccgaggcgtatccgccctcttcgagatgggacaggtatttattcgcgctgcgtagtgatattccaaggctgttcatcaaatccatggatgtaatttcttccgtttccagagaattcaggacttcggcaattcggaccacggtttcagcggatagttttaccttatctgcgatttgggaaatcgccttgacggagaaggcggggcctgtctctgaagaagtaccggcggataaaaaggtaagggattcgttctgattaaggaggaagctgcctgtattatccttcatccggctttgtccgtaatggctggcattgatagcattcaggcgggcctggtatatattgtcgccgattccatatccgacggagccggggaaatcaagtccttttatcaaaatgggaaggagcgggcatatacggaagccttccgtcagattctccatggtttcatagtccatataaagctccagatcatcataattggctttgaagattgctttattaaaatagcgctggttaaactgtatcaccacacgaaccagttcaaggcggaacagctcatatttatccttatacatctccctggctttctccgtattgatatgaatgacggcagagcggtttttgttaaactttttaataaaaatgctctttttcagttcctcgatgctgttccagaatgcccattcaccgcggtaaacgtaatagcaccggatattcttatctttcaggcgttccagcacactgtaatagtaggtgatgataatatccagcctgccttccatatactgcttttcatagaaatcctgaacacgcagctcctccagttcgatttcctcaaccgactgcaggctgctccagcgtttttcataggtataagcggcctgtgcaaatttctcttcgcgtatcaaatcctccagcgttttcttatcgtcaaggaaatccattcccacacgtgagaggttcacgttttcaatgcctgacgttataatgtggtgaagcagcgcctggtaaacattttcaacattgacggaggagtgggcgataatggcatccttgctcttttcaccgaggattttaatcgcctgcagcgggatcaggccgctgacataaaagccgtcgtattgatttttaatagaaagaaaaatatcctgtatgtcctggattgttttatacgggaagaagtcgaagataacgtcatccggtttgttcggcatgtaactgtttatcttttccctaaaatgttccttaagaatcaaagcaattttaaataccattttttctcctttttgttcgaaatgggcaggtgtaaagagggaaaggtacatatataaccttattttataaatatagcagatgggacttaagaactcaagcggctttgcactgcctggacgtgaggttgggaagtatgtgaagatttagttaagcaggtgaggacgccgccggtacggccagcggacggggtggtgtggtgtgtatatgagtctttcgtcccgggggaagattgtcgtggtatggggctgcgggcgaagataaagtctgcggagcacgctcccgctctgtgaaatgcatcacgctgctaagctcgacaggacctcgctaatcagcgatggatttcaacggcatccgcagactttatcttcccctccgccccaaaaccatgttttcgccgggacgaaagactctgctgggtgtatcggccccgtccgctggcctgcggccgctgatagtctcacgcgttaagtgcgggggcggaccttgtcgcggccactcagcgcttccgtgtgcgggaaatacgatataccttcaatgcgcattttttatataattgcggaaggtttgatttcagtttgccggaaacacgtggtggccgcgacagggtcctccccatttaaggttagagacaatcagcgcccggaacggaccatgtccggtgtcgaaaacctccgcctgagtgttccgtccccggcgcaaacctgacccggggaagtaggcggaatcaattgcggaggggacatgggagtccgccggtgcttggcgaggttccacacgagcctagaaccgatgcgcactccaaagagtgcaaacggtccccgcagcaattcattccggccggattcccccttcacgacaccctccaaccggggacggaagactcagtcagccccctcaccacaccggacatggtccgttccggacgcgtcctccaacctcagttaaatctccattatgtagtggccgcgacaaggttccctccccattgaggctggagacaatcagcgcccggagcggaccatgaccggtgtgcgaaaacctccgcctgagtcttctgtccctgcgaaaacctgacccggggaagtaggcggaatcaattgcggaggggacatgggagtccgccggtgcttggcgaggtccctcacgagcttagcactgatgcgcactccaaagagtgcaaacggtccccgcagcaattcattccggccggattccccctcacgacaccctccagccggggacggaagactcagccagccccctcaccacaccggacatggtccgtaccggccgcgtcctccattttcaattaaatttcactttgcagacacaaaagaaattcctacttgacaaataaaagagatgtgctaaaatattacctaagtttaacagaaatccctatagaaaaaggctgcgaaagtgtcagtagaatcttatttcccatcagagagaaggaatcaccggctgtaagttccttcaggttcagataagtgttcgaatttcccaccggagctgcatggccgaaccgtgatacattcagtaggctgtgacggatcatacacgttacgtataagataagagcctgcatggcaggaaacagggtggtaccgcgagcttgatgcctcgtcccttcgcaattgcgaagagacggggctttttatgttgcagacggcgtaatttatctgtgggccgtttcaaattcacacttcaaaaaggagtcaatatgagagagcaattagaaaagattaaagaagaagcgttaaaacagattgaagcttccgatgcgctggagagattaaatgatatccgtgttgcttacctggggaagaaaggcgagctgacaagtgtattaaagagtatgaaagacgtctcgccggaggagcggccaaaggtaggacagatggtcaacgaggccagagcgctgattgaggcgaagctggaggagacaaaaaacgttctggccagaaaagccagagaagagcagatgaaacgggaagtaatcgatgttacgcttcctgctgaaaaaggcaatgtgggacacagccatccgaataccattgcgctggaggaagtggagcgcatttttgtgggcatgggatatgaggttgtggaaggcccggaagtggaacatgatctgtataactttgaaaaactgaatattccggcaaaccatccggcaaaggatgaacaggatactttctatattaataaggaaatcgtattaaggacccagacatctccggttcaggtacggacaatggagcagggaaaactcccgatccgtatgatcgcaccgggacgcgtattccgttccgatgaggtggatgcaactcattctccgtccttccatcagattgagggacttgtaattgataaaaacatcacatttgccgatttaaaagggacgctggctgaatttgccagggaattatttggaccggagacaaaggttaagttccgcccccatcatttcccattcacggagccgagtgccgaggtggacgtaacgtgctttaaatgcggcggaaagggctgccgtttctgcaaaggctccggctggattgagatcctgggctgcggtatggtacatccccatgttctggagatgagcggcattgatcccgaggagtattcagggtttgccttcggtgtgggactggagcgaattgcgctgttgaaatacgagatagacgacatgagacttttatatgaaaatgatatccgtttcctgaagcagttttaatgagcggataagagtaacagttcatgttgtttgaaatgttacggattagataatgaaagagcagaggagatagaaatgaacacagcattatcctggattaaagcatatgttccggacttagacgtaacggctcaggagtataccgacgccatgaccttaagcggaacaaaagtagagggctatgagtgccttgataaaaatctggaaaagattgtggttggccagattacaaagatagaacgccatccggatgcagataaactgattatctgtcaggtcaatgtcggagaagaatccatccagatcgtaaccggagcgccgaacgtgaaagagggggataaagttccggttgtacgggacggcggccgggttgcaggagggcatgacggcggcccgcttccggaagacggaatcaagattaaaaaaggaaaactcagaggaattgaatcatacggaatgatgtgttccatcgaggaactgggatccagccgtgaaatgtatccggatgctcctgaatcaggcatctatatcctccctgacgattgtgaagtgggtgcggatgcggtggagattctgggactgcgcgacgtggtatttgagtatgaaatcacatccaaccgcgtggactgctacagcgttatcggtgttgccagggaggcggctgccacatttaataagaaattcatgcctccggttgtgacggatacgggaaacagcgaagatatccatgattatctggaagtatccgtggaggataccgggctttgtccgagatactgtgcaagaatggtgaaaaatataaaaatagcgccatcgccggtctggatgcagagacgtctcgctgcaagcggaatccgtccaatcaacaatattgttgatattacgaattacgtgatggaagaatacggacagccgatgcatgcatttgattacgatcaaatcggcggtcataaaatcattgtaaaatgtgcaaaagacggagatgtgttccagactctggacggacaggagcggaagctggacagccgtgtcctgatgatcaatgatgcggagaaggaagtgggaattgccggaattatgggtggtgaaaactcaaaaatcacagataatgtaaagaccatggtttttgaggcagcctgctttgatggtacgaatatccgtctttcctcaaaacgtgtgggacttcggaccgatgcgtcgggcaaattcgaaaaggggctcgatccgaatacggcaaaagccgcaatcgaccgcgcctgccagttgattgaggaactgggagctggtgaagtggtaggcggaatcattgatgtctacccggtaaaaagagaaggcaacagagtgaaattcgaaccggagaaaatcaaccggcttctgggaacggacatcgcggcagacacaatgcttgaatacctgggacgggtggaactggactatgataaagaaacgggtgaagtgattgtgcctagctggagacaggatatacactgcatggcggatctggcggaggaagtggcgcggttctacggatacgatgtgattccgacctctctcccgaccggtgaggctacaacaggaaaactgtcctttaagctgagggtggaagaagtggccaggaagattgcggagttttcaggattcagccagagcatgacttattcctttgaaagcccaaaggtatttgataagctgatgcttccggcagacagcgggttcagaaatgcaatcacaatctccaatccgctgggagaggatttcagtattatgcgtacactgccgttaaacggcatgctcacctccctgtccaccaattacaacaggagaaataaagatgtgcgtctctatgagctggctacgatctatattcctaaagagcttccgctggccgagcttcccgacgagcgccagcagtttacgctgggcatgtacggcagcggcgacttctatacgatgaagggtgtagttgaagaatttttcgacaaaatcggaatgaagaaaaagccgcattataatccggaggcgggcaaagcattcctgcatccgggccggcaggcggagatcatttacgacggaacaagtgtcggatatctgggggaaatccatcccgatgttgccgataattacaaactgggtgagaagacgtatgtggcggttctcgatatgccgtccatcctgcccaatgccacctttgaccataagtacaccggaatcgccaaatatccggctgtgacaagggatatcagcatggtgatgaaaaaagagatcctggccggtcaggtggaagatatcattgaacagagaggcggaaagatcctggagagctacaagctttttgatatctatgagggtagccagatcactgccggttataaatctatcgcttactcaatcaccttcagggctaacgatcacacgctggaggataaagaagtaaatacggttatgaataagattctgaacggcctgcaaggtcttggaatcgaacttagaagttaaatcaagcaggtaagaggcacccggccacagctgattcgtcagccatggccgggtgcctctttttgaaggcagcggcctgtgcggaacgggcaggttatcgttttaagaaagtgacctgaggcggagcctgcaggttcggctatcgtctatacaaataaaaaacaagtttcgaaatttgtaaaattttacttatatatgataaaaaagtggaaaatattgacggaacaggtataaaaagtttataattatttgtaaatattgctgtcgaagtatgccggcaaagacacaaggtggggaagctatgggaagaatttcaaacaaagaagataccggaatttatattatagatgatcaataccgaatcgtatactttaatgacaaaataaggcagacatttccgtttctgtgctgcggggaacgatgttacgaagcgctttgccgggaagaggagccatgccgtgactgcccggttgcgaaggatgaggcgaagagcggggtgctttataacaaggtgacccagagatgggtggaggtcagcgggggaaacatcgaatggccgggccatggcgcctgcaccatggttatcacgaccgggattcgcgaggttaataagaatttattttataatcttaccagtatatcggcttacgatgaattgtttgaattgaacctgacccgggatacgtataaaattctctatcatctggcagggaaatatgtgataccggcagaggagggctctctgggggcgatgctggacgaggtagtcacgcagatgatccaccctgacgacagggaggaatttctggaattctggtccctggacaggatggcggcatgtctgcaggaagagggggaggaccatatccttaaaaaacggctgcgtaaattaaaaacagacggaagctactgctgggttatccagatcgtagtgccgcttatccagggagagcatgacgacaagatcctgatgtgctttatccaggacatagacgaacagatgcggaaagaagaggagctgtcaggaaaggataaaaatgcagacgggaaggatccgctgacgggtctttaccgccgttcggagttcttccgtacggcagagagttttctcagggagattgaggataagagctactgcctgatggttattgacattgaacattttaaattatttaaccagtggtacggggaagcagagggcgaccggtttttaattaacattgcccagcatctgaaaaaagcccaggatgagaaccggggaatcgccggttatatggggggcgacgattttgtgatcatattgccggatgacggaaagatgcttgagcgtcttcagaataagatcatggggtttgtgaagctgtacggtaaaaatgccggttttcttcctgcatttggactgtacgccattgaaaataagaatattccggtcagcacgatgtacgacagagctacggtcgcgctggcctcggtaaagggcaattatgcccaccgtgtctgccggtatgacagcagaatgcttgaaaagatggaggaggatcacctcctgctttcagaagtgcagcgtgcgctcaataatgatgaatttaccttttaccttcagccgcagtgcaatatgacaaacggaaagattgtcgggctcgagacactggtcagatggaaccatccggagaggggggtgatctcaccgggagagtttattccgcttctggaaagcaacggcttaattgccagcctggaccttcatatctgggagaatgtctgtatcaggctgcgaatctggatagacagcggaagaaagccggttcccgtatccgtcaatgtctcaagggtggacatttacacgattgatgttgtggaatgcttttgcaatctggtgacaaaatataatctggatccgagtctgctggaaatagagatcacggagagcgcctatgcggagcagtatgatatttttacaggcgtaatagagaatctgcggtctgccgggttcctggtattcatggatgatttcggaagcggatactcctccctgaatatgctgaacgacgtcaaggtggatgtgctcaaaatcgacatgaagttccttaaaatgtatgaacaaagcccgggcagggggacgggaatcctggagacaatcatcaatatggccagatttatggagcttcggatgatcgcggagggagtggaaaccagggaacaggcagagcttctgctggatatgggctgtatctacgggcaggggtattatttttaccgtccgatgcctgcgccgcagtgcgaggtcatcctggcggatgaagataatattgatttccggggaataacggcaaaagccattaaccggatacaggccagggagctggtgcatgatgatatcttcagtgagactatgctcaataatatccttggcggcttcggcctgtatgacatgtccggaaaccaggtggagcttttgagggtaaatgagcagtactgcaaaatcacagggacaagcgcggtggagctggaagagcggcataaaaatgttgtgaatgatgtttaccaggaagacagggaggagctttttaaaatctttggagctgcctgcaaagacagattccggggaggggagggggaactgcggtacctgaaaggcgacggcagcatcatgtggatgcatcttcgggcctttttcctgagagagcaggacggacacaggctgttctacggttcggtcagcgatatctcacagcagaagcggaaggagcagcagcttgaatcttcccagagggctttggcagccgtcgttaatatctccgacagaaatacggcgtttatgaagctggcggaagaaaacaggagggcggcggcagcgatttttgcccagatgacgccgggaggaatgattggaggatactgtgaagaaggttttccgctttattttgccaactatgagatggtgaaactgctggggtatgattcctatgatgaattatccaaagcgatcggcgggctggtgttaaacacaatccacccggatgaccgggaacaggtggcaaaggatatcggctctgaatattacgcaggactggaatatacgacaacctatcggatgccgaaaaaggacggaacctggttctggacgctcgacaaaggaaaggtggtgcgcgccgaggacggtcgtttggcgattgtcagtgcctgcaccgatatttcggaaaccatgtttgtacagcagcagctttcggagagaaacgcggcgcttctgcgccagaatcaggaactgcattttatgtacaatgatatgccgggcggatatcacaggtgtgccaaatcacctggttttccttttatttatatcagcaaccgttttctggggattttcggatataccagacaggaaattaaagataaatttaacgacaaatttatcaatatggttcatccggatgaccggagcaacgtaatccagggggttgaatatctgaaggagtgtgaggaagtccacgatctggagtacagaatgctaggtaagaatggatatatatgggtaattgaccagagccgctacatggagtacggcggcaagacttttcttcagggagtggtactcgacgtcacggagacggtggaactgcgcaataagatgaaactgcttatgaaacatatgccggagtccgtttatctgcttacatacaggaatgattgtctatattcccaggttctcgccaaaggtttattcagccgctggccctatacagagtccgcatacagagctatgtttgcagccggggtcagtgaaaacgcggcgggaaacggaacggaaagcctggaggagcggctgaaacaggcagttctccgcagaaaaagctttcaggatgtcacctgtatcacggtgcccggtgaaccgcctgcctggataagcctggatgcaagatatatcagtgaaggagcggacggaattgtctatctctgtatctgcgccgatgtcacttatatcaaggaaaaagaacaggaattgtggcttgtgagaaaaaagatggaaagtattctgcgtcaggcagggattaacagtctggactgggatatagaaaacaatattctgtatctgagccaggtatccggcctgccgaaaccagccggcgccgccgaactgggaaaaaatgtcagtatccaggtgatcgaacatttttctgaaaccgcaaaaaactggaatgtggtatctggggagcacagggaagatttccttcgctatatttcccgcgtatatcaaaacagggacaatacgggactcagctgtgaatttgagatacagcgggagggggagaaccggaagtggtaccgggtggtatgcgagacgatatgcagcagctcaggaaaacctgtcaaggcggtcggttactatatcgatattacgagggaaaagaatgcggcgattgagagcagagccaatagaaaagcgctggagctgcttcgcgaacaggaggaacgtctgaccagaatggcggagacggatgcgctgacgggcctttataacaggcagacggcgatacccagaatcaaaagtttcctgagcagtatggatgggcagacagcggccctgattatgcttgatttagataatttcaagctggtaaacgacgtattcggccatgtgttcggggattcggttatcgcaggcaatgcaaaaaagctgaaaagctttttccgggcagacgatataatctgccggattggaggcgatgaattccttgttctctgtaaaaatatctgtgagaaagatttgaacaggaagattacacagatgatagaggacatggttatgagctgtgagaatgacggaaggaaaatgatattttccgtttcagccggttatgccatggctccggagcagggaaccggtttcgatgaattatatgagaaagccgatatagcgctgttcgcggcaaagacaggaggaagaggaaccttcaggaaatatgaagtatcgatgaaaaaaacgagatatgaattggcgggcagaaattaatgcccgccgtttttttccaacgaaattttccaggcagagttcgccggcagaccggttcctttttctggaaattacaggaggcataaaatggggaaaaaaaggctattcttacagaaagaaagtaaatcaggaggcggttagaaatgaataatgaatttgagatagtcagtgtcaaggggcgggagattctggattcccgcgggaaccctacgatagaagcagaagtaacactggaaaatggagcggtgggcagggcggcggtaccctcaggggcatccaccggtaaattcgaagcggtggaactgagggaccgtgatacacggtatcatggacttggagtaagcaccgccgcaggcaatatcgtcaatgtaatcggcgagacggttctgtttgaaaatgcgctggagcagagaaaaatagaccggcttatgatagatgccgacggaacggaaaacaaggaaaaactgggagccaacgcgattctcggtgtatcgatggccgttgcaagagctgcggccgaaggccttcatatcccgctgtaccggtatctcggaggaatcggggcatcgacgctgcctgttccgatgatgaatatcctgaacggcggccgacatgcagacaatacggtggatttgcaggaattcatgattatgcctgtcggggcatccggcttttccgaaggtttgagaatgtgttcggaaatttaccacacactgaaaaaggtattaaatgagggcggatacagtacggctgtcggcgacgagggaggatttgccccaaatcttaaaaatgccgaggaagtgctggagacgatcgtaaaggcggtcgagaaaagcggttatcatcccggctacgacattaaaatcgccatcgacgccgcatccagcgagctttacgatgaggccagcggactgtacctgttcccgggtgagactgcgatgaacggccgggagatacggcgcacggccggggagatggtggactattataagagactgataggcaaattccccatctgttccatcgaggacggcctccaggaagatgactgggagggctggaaacggctgacggatgaactcggtaagaagattcagctggtgggagacgatctcttcgttacaaataccaagaggctcagcagaggaatcaaagagggtgtggccaactctatccttgtcaaagtaaaccagataggtacgctgacagagagctttgatgccatagagatggcgaaaaaagcgggatataccacagtgatttcccaccgttcgggcgagacggaggattccttcatagccgatattgcagtagcggtaaattccggacagattaaaaccggagcgccgtgccgttccgatcgtgtggcgaaatataaccagcttttgaggattgaagagcagctccgataagagtgccggccgtaccgctgtcatttctctctgaacacggataagaagataatgcataaaacctgccgtcaggcagcctggtggaaaagggctgtgtggcggcaggtttttgtatctgataccacaatatttatattgtgaaaatatgaaaataatactgttagacattgatataatttggtgatattatgatcacaaaaatagagaaaaaagaatgaaaaaacatataatattctgtaattacaggagggaagcatgaaaaaagtcgtattaatggactgcacgctgcgggatggcgccaatgtggtcggaaaagggttttcagcggaaatcacggatatggtgttagatggcctgacagcatgccgtgtgccaatcatagaatttggaaatgcaggaggcatcggcgcatatgaggtagccggattcacggcggcggagacggatgaaacttatctggagattgcaaaaaaatatctggacagaggctccgagctcggaatgtttttaaatgcaaagagataccgtgaaaaaaatgtgacgcttgcaaaggagagcggtttatccttcctgagggtcggagctgacgccggggatgccgatatagccgttcaggcagtcaaagacataaaaagcgccggattaaaggctttctattctcaaatgaaagcatatcttttgacgccggaagaactggcggaggaaggaaaaaagctggaagacgcaggccttgatcagataacgattatggattcggctggtaccatgctgccaaatcaggtggcggaatatacgaaaaagttaaaggaggcagtagcgattccggttgcttttcactgtcataacaacctgggcttatcggctgccaacgcggttgctgcctatcaaaacggtattgacattctggactgcggcctgatgggaatggcaaggagcgcaggaaatctggcgacggagatttgcgtggcaatcatgaaccgttatgatcagatgatggagacagacctgtatcagatgcttgattttatcgaacagcgtctgcagccggccatggcgggatatgattatcataaccctgtgacgcctcttgatttgacactgggtctttccggctgccactccagtttcgtgaaacggttccgggagatttcagaagaaatggatgtcaatctgttccgtttgattgttgaagtatcaaagcaggatcagaaagcgccgtcggaagaaatgattcggacgattgccgctcagataaaaggaggagcctgatatgataaaagttattttagcgggaaattatccggaacagacatacgaaaagttaagaaaactcctgccggaacagaagtttgagctggaggaggtaaatgaacaaagtcaatttgatgcggttacggatgccgaaattatcatcctccggatttttaaggcgccgaaagaggtgtttgaaaggaatccgaagttaaaaatgatcctgcgctggggagccggatttgattctgttgatatagaggaagcgggaaaaagaggcattccggtaaccaataccccgggggcaaatgcaaatgcggtatcggaactgacagtgatgctgatgctggcgctggggcgtaaactgcagtgccatatggagtctttgaagaacggaatctggagcaagaacacatttttgaaccagtcatactgtctgaatcagaaacgggtcggcattatcggcggcggaaacattggccgtcaggttgcggcgaaggtgcaggcatttggcgcttcggttcagtattatgatgcggtccggcttccgcaggagatggaagaacagtggaagatgacatatctgccattggacgagctgctgcaaacgtctgatatcgtaactcttcatgtgccgcttgttgatgagacgcgtcatatgattggggaagaacaaattaaaaaaatgaaagagggggcaattttaattaacacggcccggggaggccttgtagatgatgtggctctggaaaaagcggtgcgtaccggaatgttatccggtgccggtctggatgttgtagagcgggaaccgctgtccgcacaggacgaactgcttcacaatccgaacattattgtgactccccatatcggaggcggaacggctgatttgggagatattataattccaatgctggtaaatgatatcctgagattatcagagggagaggaaccggaacatattgtaaacaagaaatatttcagatgatgaaagtacgaagggagaatgggaatgagtgagattgcaagggttttatatgatttggggattttgagtattttgctgctgttaggtgttttcctcaggaagaaggtacgctttctgcagaatctttacataccggcttcgctgttgggaggattctgcggcttgatgctggggccgcagatcctcggttcatttgcacctttcagccttcctatcggaggcacgatatcaaaatggccgggaatgctggtaaatattgtactgggcgtatcattttttggctcggcacagaataaaaattttggaaagacagcattatctgccgttacggtgggcggtattgcccatcaggcgcaggttgtggccggacttatcgtaaccatcataatgatgacgttctatacggaccttccgctggcatttggcctgactccggtatttggctttcatgggggccacggaacggccaatgcagccggagcggcgctggaagcagccgggtgggctgatggtgtatcggtatcgaatacaatggcaacggccggtctgctgtccggtattattataggtatgcttatcattaacatcggggttcgaagagggtatgcgaagctcgtttccaaaccgcaggatatttcccgttcaattaaagagggaatcgtaccgaaagaagaaagacgctctatcggttcaggcgtaacctacaatgatgcgctggatccgctggccctgcagcttgcttttgtcggaatcattctgctgatggcccacggactgtctgtcggattagttgcgattcatccgattctcagcaatgtacctgaatttgcctgtgcaatggtcagcggcgcgttcctctcgtttgtgatgaaaaaaatggggattggagattatattgacagagcgacaatcagccgtatttcaggagtggcgcttgatttccttgtatgctcggcgattgcaacgctttcgataaaggtgtttgcactttatctggttccgatggtagtgacgattgcggtcgttgttctggtaaatttattcgtaaacttttatttttcatggaaagtcttcgatgaggactggttcgagcgtgcgcttggaagctatggcctggagagcggtgtcctggcaaccggactgatgcttttaagggtagttgacccggaatttaagacaagtggacaggaatcggcagcagcatcagcagcgctttgttatccatggtcgcttccatatattatgtttatgccggcatttgcttttgcggcttcaaaatggactattttaggtatcagtgtggctcttttagtagtgtttttgattatcgcgcgggtctgcttctggcatccggagcggaaattaagtgatattttatccgggaaaagttcccgtccggtacagaatcaggacgcactgaaataaaacagggtgagagaggggaaatatgcaggatctgattttgaaaaatggatatctctttgatcctgcgaacggatatacaggacaaagaggagatgtggcgatacaggatggacgaatcacaggtgtcgggaagacagaggaagaagcgtcccagacagtggatgtaaccggacttgccgtcactccgggattgattgatttccatgcgcatttttaccatggcgggacgaatacggcgctggagttttaccggtacctctcagatggagtcacaaacgcagtcgatgcgggcagcgcaggtgactccaatatagagagctttatccacttattgagcgagcgtgagcgcagaaatgtgaagctctatttaaacctggcctcagagggactcagctgtctcggagatcacaatgaaaatataaatccaaagtattttaatgagcaaaaaatacttaggatatgcaaacgatattccgatctgattgccggccttaagcttagaatcagcgcagagattgcaacggacagtcaaaccaccagctttgatgcgctgcggcggggaattgaaatcgcacagcgctgcggacttccgttatcggttcatatgccgaattttcaaggggaattaagcgggctgattgatatcttgcggccaggggatattttttgccatgtctatacacctcaaaaagggatattggaggatggaagtgtttcagaggaaatgaaacgggcggttcaaaaaggcattatcctggaatctgcatgcggaaaaggacattttggacacgaatgcgcaggaaaagctattcaggcagggattgagccaaatataatttccggagattttacaaaaaacacccatcattttgaaccggcagtttccctgccttacctgatgtcacgatttctgggactcggactgtcttttgaaaaagtgctttcgtgctgtacaacggaacctgcaaaacagatgggcatggaaggaaaaatcggctgccttaaaacaggcgcctttgccaatattgcagttttagagagaagacagaaagacattgtgtttgtggatgtcaagggaaaagaggtcagaggaaacgagctgattattcctgtaatgacaattttagagggagaacctgtttaccgtaatatgagcgccttttagagaactgtgataagcagttggggatgacgccggtacctgccttcacgacaaaatatatatttcaaacaaatggttgtctttcaggaaaaaatatggtatgatacagttgtttgactataggaggtgctaaaatgataagaggtattctcacctttttattcgttgcgatttgcttatttttatcagtagtaatcttacttcaggaaggtaaatccgcaggcctgtccggttccatcagcggtatggcagacagctactggggaaagaataagagccgttccatggaaggcaagttggagaagatgacaaaatatggtgcatttctctggctggtgcttgcatttatattgaacctgaaagtattgtaatccggacactcctggcagcaggggtgttttttctttacaggaaaggaaattttgtatttttttgcatgtaaccggagaatttcctgcataataagaaaaagaaaactaatggagaattaaattgaaaatcaaggataaaattaaaaagaaattaaaacccggaaaaaagccggggaaacacacagagcgtatcagttcccgcactgagaaagacagagggcgggagaggacgggaagtgtgccagcagatacgaagaaccgagaaaagtccgggggcagggagtattttgagcctgaaaaggatgcggaatttctgagaagaaagcagatgattctggcactgatgaatgacaaagcctacgtccccatgaagatgaaggaactggcaatacttctcgatataccgaaggaacagagaagggaacttaagtctgtgctggatgcgctgttaaaggaaggccagatcagcctgtccgcgaaaggaaaactcggcaggccggaaacatttgccctgacgggcatttttaccggccactccaagggatttggctttgtgacggtagaaggaagagaaaaggatgtcttcattcccggtgacaggacgggcggcgccatgcatggcgataaggtgcagattgtcatcgaggaggaagataacgggaaacgggcggaaggatgtgttgtccgtgttctggaacatgccaatgataatctggtcggtatctatgaaaagagcaagggattcggttttgtgattccggataaccagaaagtttcaaaggacatttttattccccaggggtgtgacgcgggagcggtgaccggccataaagtggttgtcagaattaaagatttcggtgacggtaagggaaagaagcctgagggtgttatcacagagattctggggcatatcaacgatccggggattgatatcctgtccattgtgcgggcctataatctgccggaggagttcccggaagcggtgacggaacagttaaagaggattccggatcaagtgctgccggaggagctggcgggaagaaaggatctgagagaacttcagaccgtcacaatcgacggggaggaggcaaaggatctggatgatgcgattacaattaaaaaaacgcagggcggatatgaactgggtgtccatatcgccgatgtcacccactacgtcagagaacacagtccactagacgaggaagcgctcaagagaggaaccagcgtgtatctgaccgaccgcgtgattccgatgctcccccataagctgtccaacggtatctgttccctgaaccagggagaggaccggcttgcgctcagctgtctgatggatatcgatgagaagggaactgtaaccggacatgagattgtcgagacagtaatccgtgtagacaggcggatgacatatacggcggtcaatgcagtgattacggagcatgatccggaagcgatgaaggaatatgagggctttaccggtatgtttgagctgatgaaggaactggccgatattctgaggaagaaacgccacagccgcggttccattgatttcgattttccggagagtaagatcgtactggatgagaagggccggcctgtcgaaatcaaaccctatgacagaaatgcggctacccgcctgattgaggattttatgctgctcgcgaacgagacggtggcagaggattacttctggcaggaaattccgttcctttacaggacacatgacaatcctgatgaggaaaagatgaagaagctggggacattcatcaataattttggttatacaatccgcatgcccggtggggaggtgcatccgaaggagctgcaaaagctgcttgataaggtggaaggcacgccggaggaggctcttatcagccgcctgaccctgcgctccatgaagcaggcaaaatatactacccagaattcggggcattttggcctggcgacaaaatattatactcatttcacttcccctatcagacggtacccggatcttcagatacaccgcattatcaaggaatgcctgaacggaaagatggatggaaaacgagtgtctcattacgaaaagattcttcccgaggtatcggttaaaacgtcggcccttgagcggagagcggacgaggcggagcgggagactgataagatgaagaaagtccagtatatggaacagttcatcggagaagagtttgaaggcgtcatctccggcgtgacaaactggggtttctatgtggagctgccgaatacagtggaggggctggtgcatatccatgagttgcgtgacgattactatcttttcgatgaactccattacgaactgatcggtgagatgacaagaaggacttataaattaggtcagccaattcgggtgcaggtaacaggctgcgaccgttttgcaaagaccatcgactttattccggccggcaatataaacacggcaagatagcggaataaaacaggaggataagaaacaaaatgggaaaagagagcgtaaaattaattgccaataataagaaagcataccacgattactttattgatgaaaaatacgaggcgggaattgagctgtttggtacggaggtaaagtcgctccgtatgggtaaatgcagtatcaaggaatcttttattaagattgagaacaaccaggtctatgtttacggtatgcatatcagtccttatgaaaaaggcaacattttcaataaagatccgctgcgcagcaggaaactgctgctgcacaagctggaaatcaggaagctgcaggccaagataaaggaaaagggctataccctggtcccgcttcaggtctatttcaaaggcagtctggtaaaggtggagattggactggcaagaggtaaaaagctctacgataagagggatgatatagcaaaaaaagatgcaaagcgcgagattgagcgcgagtttaaggcaagaaacagctagaaaacgttggacagcagcagaaatttaatatgacagctcattggcagtcagcgggtaaccggctcaaaaaaaggatgtgagttgtgggctgtcattaaaaggcagagaatagatgtattacaggcaggaaatagcaaaaaattgcgggccggccccattgacagacgatacggttagtgatatgataatggggcataaaacccgttaaacggggcagtaccggtttcgacagggatcatgcagctggtgaagctatccgcatgcgatgcgttaaatggcaaacttaaaattaaacgctaacaataataaattagcttacgcagcctaattcggctgttgtcagccttagagcactcacactttaagaatctggcatcgactatgtgagaaacgatagtgggagggttccggaccgctagtcgtatcagggactactgaagttctgaggatgttcgtttccgcaggatagagggaatgtcaaagaacggactatgatagtagaagaacagggaattggtttttggacacgggttcaactcccgtctgctccatcacaattgttaggacaaaatagatgcagatttgcatttgttttgtcctgacttttttgttatacagaaaccaagattatttatataatagggggacaaatgaaatatcattctatgatacctgagttaacaatatcggacattgaaataaccaaagatttttatcttaacaaactagggtttacccttgaatatgagcgagaagaggataaatttatttttttatcgtataatggaagtcaatttatgtttgagcagatacacgaagaaggttggaatataggtaaattagaatatccatttggtcgaggcattaatttttcaattcgcgctcccaatattcgcaaacaatatcaagcagtaatcgattgtaatataaaactgttcagagaacttcaagaagcaacttataaatgtggtaatgaagaaatcttagaagtacaatttttaatacaagaccctgatgggtatctgttgcgctttacaaattagctgtgtccgccgaatgagcataatccccactgcatctattttatactaatgacacaaaacggggctgtaaaaaaacagcccctaattaggtatttattttatatctcttttttgatggcggtgccctgcgcgcggatcatacaggttatcgtttaacaggagaactttcctgttaaaaaaacagggagttgagaagattgaactcccaactgccctgctttagtcttccgaagtaaaccccctcatgtatacttccacgacgctgtggatcaatccatccccattcagcggttccgattcatattcatggaatgccgtccaaaactgctcgtattcacattgtgacagaaccatttctccggttgcttcggcgcgttccttgtatttataatatagattaaataattgctgctttaaggtttcacgtctggcgttgtttctccgttcttccatatcatccatcttgtgttcgatttcctggagcatttggctcagcacattaaatttatctcgggtaaccttgttatccgtcttgcccgactccttgatatccctgatatcattcataatggaggtcagcttttcttcgtgctttaacagcatggagctttcctccttctttttgattgtccactttgtttcaaagccaatcagatcacagaatttcacgaaaatattaccaatctgtgtcacagccagcattgccgccaatacagcggcgaaaacactgacgatccccatatttaataactgctctatgtagttcaagtcatttaccacccctttctatagtccggcagtcatgggaaaatcaattcaccaccgctgctgataaagtaggttcccgatgtattttccatcatgtagccttcttcgtcgaatttatagattttacctcctattatttcaatgtcatccacggtacaggtgtagtttttgtggatataccaccatttgaagggagaggaaaccgttgcctcatatacccagccgccattcaggtatctggccgaaatccagccttttttgtccgggagatagtaccagacgtcacccatgacaaatgcttttttatccgggaatacccgttccccattttttaaggaaccgatgctcttacctgttttaggaaagtcacggatgttaagtgtcgaatcaacagaaacggtgaggccgagatctccggatgagactgcgtatgtttggagttccggcaaagaagtatttgatgcgattgaatcccagtccagttcgataaaatgatcgccgtttgccatacaggaataggatgaatactgtttcatatgatggacgccgcctccattgggaacagcaccttttaccgaggtgtttccgccgtttgtccaaaaggccgtttcatcgtctgagactctgattacatcttccgtatgattatgcctggaaccgttccagtgcaggtatattcttccgggagccggcgtggaatagatatattgcttccctgtatttctctctaatgaccggaatgtttcaaagagtgactggcagttaataaaccaggtttgatgaaaaagcttctgggcatcttccagccctatcacgtgtacatacgccataaacttccagatggcgcaccagtaggaaccctgaaggttgggaaagccggattcataagcctccttccacatccatacgacgttgtcagaaccggctccttttgtcttttcatagatataactgattcccggccaggatttttcaagatatccgtcccaggatttctcataggcaatgacttcttttatgatttggtcttttgattttgtcgtcatttagcatctccaatttaatttaattattctttcattaacatatcaatcaacacagtatactctgtatcggtgattcgtttgtttagtctgaatacctccagttttatttccatgtcagagacaaaagcctctgtttttccgtttctctttgcagcagattcgatcagttttttacaatttctataagtcatgtttatttttctcccttcagttccattaaggataatcggtagtcattgtctactattgactgggttaattcgttcatgagtaattcctgtgcatcatgctctgcctgaatgcggagaagaacattataatcaataaacggatagagactgaaaccggtaaatattttattaccggcatcgtcaaggacatgaatctcattccctgactcatcttttctgttggttccatcttcatttaattcaaattgctattgtggctcgtatttgtagccgcgtatgtaagagtcacatttgcccggaaagctgtcatcatcgatttcgtattcggttaaaccagagcgggtagttgcattgatatcacatatttcatggtattcgttcatgaaaattttcatagagggctgtcctttcttatagataaaatttataaagtagtttattgtatattgagaaaattattaaacaaggagagaaaaagatgagatacgacacttatttaaaaagaggaaatttggcggacagtacaattggcaattatatgtggacggccaattattttaataatcattaccctgagttgagtaaagctaatttattagattataaagattttttaattcagaattataacccgttaaccgtcaatgtccgcatccaggctatgaataaatatctggaataccaaaataaagaaaagttgcagcttaagtgcgtaaaagtacaacaaaaaaacttccttgaaaatgtaatcagtaatgcagattatatttattttaagagaaaactcaaaaagttggagaacaggcagctatattttgcggtatggtttatggccgcaacaggagcgagagtcagtgaactgattaagtttaaaattgaacatgtagcgaccggatatgtcgatatatatggtaaaggaggtaaactgaggcgtatatatattcctgaaaaattgcaaaaagaggccatagaatggattagtactctaaatagggattcgggattcctgtttgtgaatcgtttcggtaagcagatcactacgcgcggaattgcacagcagataaaagcatatgcgattaaatttggattagagccgagagtggtatatccaaattccttccgccacaggttcgcaaaaaactttctggaaaagagagaggacctggcattattggctgatttattggggcatgagagtattgaaacgacaaggatatatttgaggagaacttcaactgagcagaggagtattattaataaaatagtgacctggtaggatcactatttatattgggtattattactatgaaagcagccagctctgattcagttacatttgctaaatcaaaggatgtattggcggcatagtatttctgtgccgccaagtcttggagagattgtcgaatgcctcttgcgatacatcggaaaatctatcatttaatgctgaaaaatcatcgaagtcattattttgtcacaaaagatgcatacgaagtatctaatactgaaaaagcgtctttcatttcatcgggctcagttatagtaccggagtatgataagttgaataatgaaatcggcagcttatctgtttcttcctgtattttcccaattaactgttgaagttatacagaagttaattctactttttttattctaaaggttgatgaagtattatacaaaccaaactgatcaagttgtagaaattttaaaccgttaatagaacgtatgtctaatactgctggttggctggttccagcacattgaatggcattgctacttactgcattccagctagttatgctatcgtacacataaaatttatacattgaattggcatatacctttaagaaattccagccagttagatttaatgcagttgttattctaaatttgcttctggtatcgccaggtacatacaaggcaatgccattactatcaatggaagtattatacgctccataataaccccattcaacattaacagtacttccatttattaatactgatggagttaataacggttccatcgttccagtaacaccaaagatggttacaccttttttgatgttactggacaccaggtttgtattacccgccacggtaatagctccactagcgtatctgccagccgctatagctgttttattcgatgttccgggtgtaatggttgctgctccctgagatggaatcgtaccagtgattttactgccactaacccatgctgtctttccggatagaatatgcccggctgccgctgtaccagatgtctgacttgccagactgttagcggttattgtatatgcttgtggatgataaccctgttttaccgtatgtgctcctccacagtttagtgcctggtttgatgcgggggagttaacagggattgtcccttgtattggatcatcatcactatcatttgtaatagctgtatagccagctagtaattgattttttgttgccgtgacatcagaagaaccgttgccaccgccagatttaagtaagatacattctcccattatttacacctccaatctaattgaaggtattgcatattaactaaatattcagataatttcggggggggggggtaaaagtattgcaatttatcatgattttaatctccttttcatggtttaatatataaaataagggagcactaatcggcttcccaagttatctaaactagctgcaaacctggtgcagcccagtgctggaacgttctccgtaaaggctattcctatatgctggcaacatttatgaaataatagtatttaagacgtaatgactaaacatcagataatgttatgttagttatatagattatctttgtaccgcctgactcgattctactaagtgttccagtggcttctacatacacaaaataaggcccagacagatttgtcacatcaagaaccaatgttccatcatcaacagagatacttgtgtgacgcgaataggatgtagctgatgtactagtagatattcccaatatatatgagacagtaccagttgacaagccgctttttaacacattacatttgaggtatctataagaggatagatctaccgcattgttaaatcgtatagacgcggttccagtatctccgtacacattgttatttactccaatatagtatgcgtttatgtaagaaccagacgccttaccgccacttgtattccaactgaggaatttctttatagcagtggctccgccagttgcatctacgggaggattgttaatgctattaccatatttaagaaatacatatggcgaagtagcaattcctgaaaacgtccccgtcactccaaagatagttacacccttcctgatattaccggctactaaattagaatttcctgccacggttatagctccactggcataagttccggcagatatagctgtttggttacttgtaccaggagtaatagtcgtagctccctgagacggaattgtccctgatatcttgctaccattaacccatgctgtctttccggatagaatattattagccgctgctgtaccagatgtctgactagctaagctgttaactgttactgttcctcctgtcgtataacccactggaattgcctttgactgaccacagtttaatgtcgcccttattgccccattattaggcattgtcccggtcactggttcaccgtctttattgataattacctttggagctactacatcggcagcggtggccgtgatgaaatctaaatcagtacctcctgattttaaaagaatacattctgacattatatacacctccaatctaagtgaaggtgttgtacagtggctaaatattcagataatttctctgggggggggtaaaagtgttgcaacttatcatgatttgttctccttaactcctatttcatctagaatttccattttttcttccgatgataatttatgataatttccgatgatgttttttggatcttccccagcatcttttcggatgcataaggctctgataataatattcttctgaattgtgttcaacattacacagcacctcctatcatgtcggccattaccacagttaattccgtgagctgtgattccaataccatcacctgttgttccggggtcggaacatactctatcatttcctctgttccattctcttgtattctccagaaaaagccttccctgaagatatccccaggattacatgggtattgagtacaatctactgcgattgcctcatctccatacactcctctggctatcctattagcttcctcaaagttttcaaatcgactaactgctttgataattccttggtttataactgcatagttttgatgaactgacatattgttcccctttcaatatttttagtataaatgcacaagtacaatgccagaaccgccagatgatgaaagtgtgccagtagatttacaatatccactccccccggctccaccgccagtatttggcgctccattcgctcccggtgtatgataatttccagttccagagccaccgccaccattgccaccagctccgccccatgtaggcctactgctactattctgtgctgatgttccagctccgccaccaccactataaagagttccacttccccatgctctcgtggtggtaccttgcccatacgagctatccaattggcctccttgagtatccgaaccagctcctcctgtatatccgcttgagccattagaaccgccacgaccgccatgtatcatgcctccattcgtattaccaccgccagaaccgccacgaccaatgcgttcgccattatcagaacacgtgccaccagcagcttccacaagcacagaaccagatcttgatacgatagacggagaaccattagatgcaatctgccctaatgccccgccagtgccaacaattatggatagaacctctccaactgttacagatatgttgttctgttgcttcgtatatcctcccccagcaccaagccctgcagattttgtggttcgcgtactggacgagccaccacctccaacagcaaaaatatccagcttagaatatccggttggtatcgtgtaattttgcgaacttgtgaaggtgagccatagctcgctctgagtagccgaggaggaatttatcacaccgccgtacattatcccagcactacaagttgcatatgatcttagactaaagtagtaggttgttccaaacgatggaagcgttacgacaacctggctccatcctccgggcgctgtattattcccggctcctgtataaatgacacttccgccagttccaggatatccaccagtgccatacctgatttcaactcctgaaaagggcttcccggtcgccgcatacggattctgccatttaagcagtatttgttttcctccatacgcggctgcactaaaagacaatatactgttgacacccatgccacccgtacgaagagcgccgtccttccaataagtttttccgctgtagacatatccatccgtagcagtacaagcagtttgactagctaaactttttgccgttaccttcccggaaccgccgtgttttccggcagggattgttacggaagcaccggctactaaatcagaagaattccagttaccgcgatctattatagttccaattattggttcaccatctttgtcaacagatacttttggagctactatatcagcggcgatagctgtaacgacgtctaaatctgcaccgccaccggatttcactaaaatgctttcagacataattacacccccttgatttgaactgaaaaatctacagttggtttcttgttataacaataaaaagtaatcgtattagtgctagacaccgcgcgatcaaccatcccccaagccttgttttgtgcttttacgttaactgccgtaggtgatgttccaagataaatgctgattattggtcgatcatttgcactggttccagcgacagatatactttgagtatacggaacagtattactccagccagatgccgaaagagttgctgtttttacagcttcaatcttgttgattttatcatttacttcgttatagttatcatctactttttgcgtcaacaatgttattaatgaatccaccttttccgcagagtatgaaaccaaactggcctgttcagaagttggactgtcattaattccaactgtgttttgggccacattattaataaaagtgacgacttcttccgagaagaatctttggatagcaataattgcatctcttgtccaattccatttatctgcattaaaaaaacaatccaaaacatctggattgtttttcaataggtcattacaagcggctagattaccatcagcaaagtaggtattgtattgtcggacgactggcattaaaaccgcgttcacgtccgtcattcgtttcatggtatcttctttaatagggaaattagtcaacggtaggtcaacataattttcagattttggctctatagctatagccattaagcgtccctcctctcaattgcattttgtttgtttttaatataagaaaaactctctaagaatttgtagagagtcatggtcattgttccttctaacgtagaccaggaaatgttttggataatatatcgttctgttttcgcagaaacattgggggtatattcgattttttggttcacatccagccagggtattatgataaggttaagcgtgacagtatctttcattgccgtagtttgataagtgttgtattcagcctggttgtagcagagatcgtcagaatataacttttcatagttctgccggtggattatttcgtatccaagattttcaacagagaatggacaatctggattatgttctttgtatatgccgtatgcctgatattgtcccatcagatacaggcagttttgaagttctccgtttagtgtgcgccggtacataaaaacataagtcgtattgccctttagccgtccgtccgctattgaacttccgtcatcattgacgatgggaataggagataagccgttaatgcttaccttatcggctccgaggctatcagagcatattttaatcgcaatgcgatctaagttgtcaaggtcatctaagctggtgatttcaggaagggtaatgctgtaaacattgccagaaacagcagataattcagcataacgatcattgtttgaaagttctatcacttcgccccatatttcagttacattgtatatatctttaaaagaggtactgattaattcatttaccacaagtggactaagctgagtgtcattaaggatacacggttcggagtatccggtcggaatctgccgccagacaaatgtgccatccacgtcaaaataaaactcccatgagtcatatagctcacagattgcagtccatacgtcgcaataggttaccgaatcagagtattccagatcatagggaatctctttgccgatatcctcaatgtaatatttcgtgattccggctttttttaccaatgctaacactgattgtctaatatcttcgccagcaggaacagtgagagagtatcctttcatttctccattctttgttccgtcatagtcggccattaaatcagcacaggaaagagatagatttttctctgctccactgaatgtataattggcgtctatgtaagtaaaagtcccgatgagccaccaaagtatttcatattctctggcagattcaattccgtaataaacacggaggtatttatctatccaaattttcttgtcatttccaattaaaaaagaataatcagaagcaaaaatatcacaattataggatctgcgctgttttgctgaagaatctactgataaagaatcgttcaccagattagcagtaagagaatcaatgatcttgaaattcttgtttaataactcaatttttacataaacatttttctctttttgtctaatcgccctgaaatcagcgtcggtgggatagtaagccataattcatcctcctccctactctcggtcaacatcagtgtcaataaatccgttatcatacaaatctgaaatcatggtaggatcaccgcactcaacccattcaatctgatgggagacattttggtaatgttcattaactgtacgtgggagatttccaactatattaaccatgtacatgtttccttcaaaagttttaaggatttttgctcttccatcggctaggaattcatcaatcttattacgatacctccatccgttatcaacgtcataatcatcatccttaaattcaataaaagtagccgccagagtcccggagtaatatcgcgccactccgttatttacgacataggggtatttactaccgataggaacgatggtttttgattctctgttaaactgtgttgtcgtttcagtatccagatccagcgggtagatttcgtcttgcccgaccaggaaataacaatcaaattcggaacggacagaggttgaaatggtatccatatccgcattcgaaatgaccgcaacataggcatattcgatatcggtattagacggttccagatagtcgtaaaattcaattgcaaagtcttcgttggagtgaatctctttttcaaatattgttttccatgtaaaagtacccttaaacctttttttgattttgattttctggacgatactttcagagtatgtaacattgccagcgtacaaatcgttatgatataacgcgtgtagatacgtattgaatgtccagtctgttggtatattccaatcgaattttatcagtacgtctttggtggcgtacagctcgtctaaaatcatatttttgagcgtaatcgtagtaacagtttcgtcccgaataccggtgccataaatggtttcaggacatccggcaaatgttgaaccaataaacatgcttacaccacctttcctaattttcttatttcgatatcgggaaaaccatccctcctgtaaactagcacgccaattttgtcatcattttgcgggagtgcaatgatattactataccgcacataatgcacccaatagctagttgcctttaattcgtagcaggcgcgcatttcatccgttccgaatttaccaattctgtatgtaatagagatatctaatgcgtttgaagtggaagatgataatttcaagatttcttgatttggttctgcgttatagaatacgattgccagagaaaaatccccctttagtgcaaacccttctgtgtaggacagagaattgttttttaaatctacatattctccgtttatgaaaatcgcctctgattccggatggccctcagaagatacaatattggaacggatttgaatacaaccttgttttgcaagattagttggttccagcagtgagaatacatcgcgaatactgtaagttaccgacagatttatatatccggtatcgacatcgattccgtttactgtctttccaacggcgcggacactgtactcgtttttatttgtaaagccattaaaggtgtgtgataaaacagaagtatcgtactgagtgcctgatgtggaaagaagagagtgggatttcgtgtatagggaaattgaccatgaatccaataattcgccattctcctgagaataggagagtgaaaacgtataggatgatgcagaaatcacttgatttgaaacaatattcgtaaatgcaaaggatggggactttaaacatataaatgcttgccctatttgctgtgggtctgattcaacgttatctttgtcaaatacagttatgaatgcattgtacttatttccgttagataatgtcgccattgtaagatcaagtggatgttcgtatttgaacgagttgatagttttatcgtagaccactgcggcggtttcattatttttaatgatacagcgatttttaaaagcctggttgccgctccagttgaattttatagttccgccgataacagcgtcaaacgggactatgggataaattgttgcttgtattttattcacctcctagtgtttatacaatacttcgagatttcgtcatattatactaaatattctgatttagcgtaggagccccttgtaccgttaaatcattttctgatgtagtaagcgtgatttcccaacctgaacttatttgcggtgttgctccatatccaattatgatttccgggattatcacttgtaaatatccaccccattgtgtagatgtattcccaagtagaatgtatctaatcccagcactatcggaggcgaatcgaacaccgtgtctatttgcctcagcactccaaccagttacacctgcttttaccccataccaagacgttgtgttaatataggtatagcctccgattgtatagtttaaacacatattatatgaccaaacatttacgcgtgacgaaaacataaaatttaattttggcagtttgatttttatggttccagtattttcgggtgaattcgtaaaatattgagatgtgttgttgatgacaagcatgtcgccgacatatttataatttcgatttattacattgacaatatcattcagcgtcttgccggcagttttattctcaatcacatataaatccttccagttattgcaaggagcacatactcttacaatatttcctatctcaactggtatagtagtagatacagtaaatgtgtttccacaatacaggacccgacattttgatgtatttacaatctcggttacttttgctgtgaatgttttatcggaatatgatttcgatttgatcatgttgtgtatttgagcagtaattgtgtccgctatattctgtattgcttgtgaatagttcatcttatcctccatacaaaataggtgagtgcctaatgaataagcactctcctataaatttaatatctcgatagtttttgccgcatggcaggttcaaattctcttgacaatgcatttacaaattgctcagtattatctatattatgcagtacaacatcacccatattgaactctacacgagttccacggtctggaagattgaagttagagaaatcgggtgtaataggcacaatgcctggaatcggagtaaactgagacacgttcgcccataaggtatccatctgcttttgattaaggacagcctcacccttatgaataatagcccggacctcgtctgcatcgagttcttcggttgataagctctgtacgattttgaatttttcattagagttgctcggaacgccgactaatccgttctcaatgccgcctttataggccggaagagatttcttttgtttttctctctcctcgatttcctttgccgggccagtggcttcaccgtcgggagtattccagttgggacctttcgatgaagagtggcctttaccgccaccgccgctacccgttgatggcctggaattggccgcctttttcgattcctcttcggccagcttctttaatgtggcgagctgttcctccagggtctttttgatttcctcccaggtggcagtgtactttgatattgtttcacggtttgtattggcagacttcagatactcttttaaatcatcataggaaccagacatctggttctgaaggttctccagcgcagacgccatatctttactgcctgtcgcatttaaaaccgcatcaaggtattcccgggaggagaaaccgtctttggaagccagaatcaattcgtcgaatttggaaagaacgtcctgatagctcatggaaccattctgaaatgaatcggcatactgctgcataagggatgataccatttctgctgcatccatctgtttatcatagagttctttttgagctgcgatattctcgtagttctttttcatcatatcaaagatgccagtatcgttgccggacagaactttctcttcccagccattgccaagaatttcaccggccgtgacgttgttttgggccttttcaatatttccggcaatttcagaccatttctctttgattttgtcaagcttctctatctgcaggtcatatccttcaagaagtttgtcacgttcctcctcaagtgcagatatctgtttttccaaatcgtggacaatcttattgtagccggcatcggattttgcctggttggccgcgcggattgcgtcctggtcggcctcgtaatttatctcaccatttcttactacctggttggtcttttggttccgggcgcggtcaagatcgtaggcagcctgctccagcgcgaactggattttcctctcttcattttgtcttttgagtacatccagctcatcctgataaggcttgagcttagcctcatactcgttggccgcggcatccttcaaatcattgattgcatcaacctgagcttctatggcatccacaacggcgccaatggccgtatcataggaatcggtgataccatccagggcatcgcggatatttcctaactgattactcagattagagattttatcgaatgggatttgaataatctgcttattccattcgttctgggcctggatgagagaggagatttcatcctcgacatcttgaaggctgcccgctgtctcattgaatttactactgccatactcgtaattgccaagctttttcgtaagttcctcatgctcttccctgagtttttcaatttgctgtgtggagatgtcgatcaggctttggagctgttctttcgttgccgcgatgccaagactgctctgttcgtctattttatttgtcatatcctgcttgatatgcttgagcagttccatgtaacgttctatgcggcggattgggagattgaggatttcctcgttccattccgcctgctgtctctcacactgggagattgcgttggagcagcttgcaatttgagactggagattgtaatattccgcgctgccttcctcgacctcatcagcctgttcttccaaggcgtcaatctggtcgtaatagagacttatctgctctttagacagacggatcattctttgataatcggcctcggtaatcatctgcccagtagtttctttgatatccatctttgactggagtttgtccatatctgcgccaacctcatcaacggatgctttaatcatgctgatgcggatttcaaattctttgcggatgtcttcggtccgctgatttatggaatcttcgagggcatcttcctgttgggtgaaagcggcataaattgccatcgcctggtctattaaatctgtatttggattattgccattactgtcggcagcaaagatatcctcataaccttccggcgatacgtttccgttcatgattttagaaatcaatgcatttccgtcagcttcgccaaatgcagcggtaattttctgcctgatttcatcccactgcctggaataaatgtctaaggcggactgatttgtagtgattacctgttcatccagcgccaggagctgttggagagcggataactggtcttgataagagtttgtctcatcttcaacagagcgtagaatcttattgcggcttctggagatggagtcaagggcctgccggatccagttgaattcttttttctgagcttcggtttcttttcgggattgggcatcgccgccaccggaggcattagattttcttgcggtatttgtcgctctgccaccagagagtttatactccttaggcttgtataggtcagttcgcataccgctttccaggttgtctgcaatactggtattgattgcgttttctgcaccggcacttctgacaactcctggtgcgttcttttgtttctgtgcatactgtgcgttctttacggcagcttcagcaataccggcggcatttgccaatgcaatcagattagcgatatctccgtcagtaacaatgtcagtgttattgcaggagattttagccatcattaattcaatcatggaggctctggcaatactggcagattcagcttctctgatgaaagcggccagttctgattcagttacatttgctaaatcaaaagatgcgttggcggcatagtatttttccgctgcgactaaatctatatcatttgccaggattgcggtgattccgtgttcttcaaagaaagaattgattagccgtgcgttttcttcagttacattatctgtaattccggtatgttttatataagcagttagaagattatcaaacgctatctgagttgcttcagcgttaccttttgcattctggattgctctgatataattatcaatgcctgatacatctttaaatttttcatttaatgctgctaaagcatcgaagtcaatatttttatccttgtcaataaatgatgaatatgcggaatttaatgctgaaaaagcatccttcatttcatcaagctcagctatagtaccagagtatgacaagttggtaaataaaatcggttgctggcctgcttctttctgagcttttcctattagttctcgaagctcttcaatggatgtagtgtcattgaattttacatcagccaacacagtcaagtcttcatcagatagtccatcaataaagtcagtaaatgtagatttatctgctccgtcgtaatttgctttgaaatacgctctctttgctgcttccgatagtccttttatgttgccttccattaatgcaagattatccgacaacacctgagaggcattgaatacttcttgataggattcagatgattcactcagtccagaaacttgtaactgtgcttctatttggatatctaatgcatattgtctcgccttatctctagcttcttcggccttttttaagtttgcggaaaactctgtggtttgagcttctgtcggattactatatttactgtattcctcgttaagagaatcgattatattctgctgcgcaagcatttctttagaagcagacttcatctcatctaacggagttatctgcgaagcacgagcatatcccacattggtgaattgaccatttttcatttgcatctgagtgtaatactctgttttatatttagaagaagattttttattaagatattcttgagcattcttctctagatcactctgtactaaatcatgtcttgctttttctatattgtataaattctctaattcttgccgctgattctgtagattttccagttcctgtttatcggtaaatgacaaagtacctaaattttgaatatcttttatcttctggtctacttcgtctaacttggaagtgtaactatccatttctgattgagaattcgcaatctcagaattaagttctgcagctttttcgcttagctcctcgaacgaagtagtacaaacatttattattttatatgctccggccatagcggcgatagctacagtgatgcctagcaagattggatgagctgatgatagtgcttttaattctactccaagaccttttatcgacgccttaaatccagcagtaactccagtggcagtggcttcggctgtagttaatccagctgttgtaattatctgctgtgcttcggctgcttcgactgctttcgctgtcataatggcccttgcctgttccgctgtgaatactttttggtttattgcagctattaggacttcttttgaatatccagcagtcgcttgttttaaaccttctacagtatttgctgcctttgcgtttccaagtccgccaatattctccataaaagtaaatgcttttgtaatatcatggattgcatttaatgaattgcctagattcgttagtcgctttatggtatactaaatacaatacttttattaaggttggtgacttttatgaattatgaggaagctaaatattattttgaaaacaccatagatggtataaagtctacaatactattcggtgtaattgctgatgataatatacaaaaaggcatttcttatattaaagaacttacatcctgtgatgaccagacagcaaaattaatttggtgcgatttaaagatggattatggaaaagcaaacaatccaatccttctagcgagagaagaagaaactaaacaaaaagcgagagaagattatttgtatcgcaataacgcagaatgcccatactgtcattctaagaatacaaagaaaatttctggattatctaaggccggttctgtagctatgttcggtgtatttgctatggaaaaagtgggtaaacaatggcactgcaataattgcaaatcggatttttagacaaaaaggcaagagtgacctatgggttattctttttgtatttaaatatcttgagattgcctggacgctttaagcatgtaagattttgagtgatattatactttgaaaacaatcaaaggagatataaaaaatggaagtttcctataattttaaatgtaataaatcgtggcggtattgatgtaatgttgattatgtccggaatgtgggaaagaaatcagtaacaaatcagagcaatgtattcattgtggttttcctatcagaaagtcgcaagcaaaaaatatttgtaaaataggtaatgtagaatatgctctaacgtcaattcttaatcgtgttttagctaatgaaagtatatatgcaatcaaggaattgagggaaatgacgaatcttggattaaaagaagccaaagatttatgtgataccataaaagcctcaaagaaagtaccgtatgaatataaatatgaggatacggcaaagagcgtatttcatacgtccagtcttcctcattgtccgacctgtggttcaacaaatattgaaaaaataggggtattagaatgcggagcatctgtagctatcctaggactattctcaaagaagataaataaatcatttaaatgtcaaaattgtggattacaaaaaggagagagtgacctacgggttactctttttgctatagttgctttgtttccccaatggagcaattttgtgtgatttagttgtttagttattcacgacagggtgaagtgtcgctgcgttgggacattcgttaagagcatatcaactaaggtatgacatactccaaggaagggtgccctctctactcctctcaatccaaatatttttaccccgtcatggctttcgccattgctgctctaacggattatataatagccatttaaaatgtgattgagttggctcgtgcgttaccacggaattcttgcatttcagcaagaacttttgtttcatccgattcactgttgatagcagaatagtggtttcaacgaattattcctttatttattttgtttatagaaccctattcgcacagaattgtctgtcacaccatttccatgacatccttttctatactagaccaaccaaaaaatctaggcaatttttgcagctctgcatttgagccaatctaggttctgtataaatgcaccgattccaagtccggctccgacagttccaaataatccaagtttcccagtcagaaaatccacagcctcagcgaatttattcaatatatcaatagatgccttcatatcatcgccgccaaacaggttctggccgattccaactcctgtttcttttaagcggtttaacttataatcaacactatcgaaaattccattcattgcttccattgcattcccggcgcttcttgcaatggaaaccattgcgttttcagcggaatcaaagtttgataagatagtattccccgcgtctgtctgttctttcccgaatagggcctccagagtttcggcctgcgccttgccggcaagagtattccatacgtctgatatttgctttaagatatcgtaggtggatttatatgtattggcgtcctgcatgacggaaacgcctgttaaatcatagattgtctctttgagattatctaaggattcactgaactgtcccgtatcctcgtcaattccgcggatgcgcatggaaacggatttcagtgcattcccggcttcaccggcgtttccggtgatttccgcggcagctgtgccgagggcgatggtctgctccaaggtgttatttccggctgccatggcagaagctgaatttgtcaggatatctacgatagttccattattcaatgcctttgtattcccgatcacattaatcttcgatattaccccgtcaagggaatccccggcttcgattttaaacgcttttaaagatgtggctaatccatcgacggcctggccgatgttgagatccggcgagatagacgctaagatagcgctgttttttgccagcgccgccgcgtctttgatactatatcccaaacgtgaccaggcagcagcggcgtttatgatttccgcagtcggaacgccaatctgttttgccgtatcgttggatgtgaagcaaaatgctttcagctctgcttctgttgcatccgtagtcttttttaaatcagtaagggcagaatcgagttcggcaactttgttctatatgtttttaataccgctaattacggccgccattccaccggcagcaaaccattcaccgatttttgaattatttatttccgtatttgccatttaatctctcctttccttgtggacgcggcagcctcccggatatgggagtggagacattcaaattcatcagcctgcctcttttttgagaagcgtctgttcatgtgctttttctgccatgagtgaaattactttatcctgcagttcttcaattggagtgtcctttagaacaagataaacctctcctaagcgtgaaatcaggttttcctgctcggacaggaaggcggaagtataggtgtataattttgtttttagttctagttccagtcttttcatttttaaccattttataatcattcggtgtctccttcattctatttttctttcatttagctgacagggctgggattctattgggaatccttgttaaccttgggaacttatttcggcctgttggctgtccagcgttcatatacgagctgagtctcttttttgtgaaaccaggcaacaatgcgcccttcttccttttcagactcccagataaatttcggctggcaaccgtgtttcgtataaaatataatctgcttgagctgggagatgggaatcagattgcttgctccgcagacttctttggcttcttctaatgaataaaatttgatggcaggctcactcctttctgcttggaactaaataaagtattattaaaatgcaaaaaaacagggcggcaaaccacatcccgtagtttgtcaccctgcaacgaaactacaataatttttcccgaaggctcatatgcccttcaggtctcttttgatgtaaagagcagagaaacttcaccttgacgggtttattccccgtcctcaatctcaacaatatccaagacattgccgtcacgatcttccagaacatcgaaggtgattgtcacggctcccggatcgccggcggaagagaaagataattccaggtttctctgaggcgcagccttataagccgtgattttgagcggaattaattcgccttcctcgttcttatccagtgtttccatagtcacacggtaatttttcggaatcttcttattgttgaaagcaattttcttaactccggatctcttctccaccagataagccacttcatattttgcagattccacaactgcggacgcttcggaagccgtaaaggtggaggcagaaacagtccctgcgatggatgttccggcaaaatcaccctcggcatacacaaacacggaaccggataccggttcacttgtgagcgtaagtttgccggactcaccgccgacgagggtttccctgaccggaataatcgcatttgtctcgattgtgccgtcgcttaagagcgaataaatcttgaacggatgaacctggaattccagagtcattgttccgctgagaggatcggagaaggcgattgctttgctgcctttcttcatcgcataaacggattcacccgtaaatcctgctgttgtggtattgcagaaatctgcgaataaccagggctcatttgttttgtagtccctgatgtcgagatcacaacactgcctgtttgccatgtttaaattcataattttgtcctcctgttttttgtattgatttatttataatcagcccgtgtgaagggggcggattgcagaatttcagacagttcatgcaagctgaactgttacggcgtattgccggttggatttgagaaccactgattgatgttgaactgagtccccttcgttccccagacggaagcagaagtacattgtatgtcgtataccgcattgagctgctggcggttaaactggtcgaagagttggtacactgtggcatcccagattgaaatgatgtttaggctgctgcttctggcggcaagggcggagatgatattggacagctcgtaatcctctgccccttctttttgcttcgcctgcttcgctcctgatttgagcttttccagaatctttaatgccctcgcattttttgctttggcggcgtcctccaggcccgggttcttcgctatatgctggcgctgcaatatcaggccgcagacttcattccagttatttctggaaatatttcccgtgagagtaccgtcgtcctgtacctgataggagcaggaagcttcatgaaaagaaatttcacctgttatgaaaaaagataatgctttttgaattaacacattataagctggatttgtaaccagaaaatcgaagactgtgcacttgactttatctgaatcggagagagaggcgtaataatttagctgttcggaaaatatcggactgccatcatctgccttgaaataagtatcggtatctaacagtaaaagactgagaaataattgataggaatgaaagccaatcgcggcaatatggcgcagtgtaacggctttcacgctgccgattccggagacagggagcggttcgggggagagcagatcaaattctgaaaatttcatatccgtcacctcctatccatttcggttttttctgatttgataattggaatggtaagtataggaaagtattttgccgtaaaaaccgctgcctggctcagggagcttgaccggttctttttcagagagctgcatatctccgatggcatagttctttttaatggaatccgtcacggtgagcgacataatcaggcggtcgattgtctggcacagacagtcggtacggttcccgtaaatccccctggaagcgaaatattctttttccggtccggacaagtgtatgaggtctttgtggcagaagactgtgatggcaacgccaacctctttgagaaaacgattaggcactttgaggagctgggtttctataaataatgcacaccggctgtccggtacggcgccctccaggtacggaaggtcaaaacaatggccggtgagcgttacctcttttggctgtcctgttacggtagtgtgcattttcccgccataccagttttgctcccgggtgaaatcaggatcgtcgggaaccggcatgactaatttgactgtatcttcgtcttctaagaacagagacatcagactttctttgattctggccatatcagccagtggatttgatatttgcgtcacggtggcctccttactctctgccgtcaatgagctgtctgaacgcctggtgcagccctgtggaggccagcccggatacggcgccggctacaatgatgtcaacggaaaatttttgctgtgcggtacatgccagaagcgcgccggctgcacagcagatggtcggaatccatttattatcgacgtctgaaatccatttcttcatgatgcagccgatgatgagacaagctgtaaccacaagggggatatacattccggtaataaaagttaaatccataattacaccttctttctggaatttgcatgtgccggcagcagaagcgatgtggttttgctgccggcctggctgttacaaaaagcagtaacgtaagctctttttcttcattaggttggattggataaaatgagataagcttgtaaatacacgacatttgcgattcctgccgcacttcggtgtccccaaaaagacagcttgccttgaactattacgtatttttggaaaagcattccaacagaaccgtagagttaatattatataaggtacgaagaagtacagatttgtttttatttaaggtagaattcaatttggcgtgattactgttaatctgaggggaaatcaaaaatgccctgtcgatcagccaggagaacaggccggcatagttcctggacaggtacatcccctgaatttctctgataagctcatcgaaatcacttcgaagaagcagatactcctcgtcatttttatcattgcggttgtaatcgtacagattcagggaatatccggcaatcagatcctccacctttttacacgtcttccggttcgaatccatttcgaatttattaaaaaaatgggacatcggcagggtgggttcattggaacggaattcggtaaatacgagtttgtataagcagttcatcggacaatgcagctcaggattgatattttccttattaaagtcctttctgatgagctgccagaaagccgggtacttgtttttctttatattcatatcacttttgattctttttatttccctggacaagtcaatgtcaaaccttcgttttgcattgtcaatggccacctgggccaggaccgacaggatacacacgtaatcggagtactttttatcggtagaattacaggcgtaggtttgggcaatctgagccagattgcttgattcccccacatctaattgtgattttgcaagcccgttatccaggttggcgaagtcgtccatcgtgttttggcagacatttttgtctttgggaatattgtttacaatggtgggatagtacaggcggcattttctggcatgctccacgatatcgggctgattggtggtgtatccgctgtccgagtcctggtcagagccgttattcctgtcctgaaagtcagttccgatgagattgacggcaataatctgcttcccgaattcaaaatattcatcaaattccggtccagatacattgtgcaggtaggtcaggttatttttgctgttgaacggacttctgaaaaaggccagatattctccgctgccaaaacgttttgtatggcactggacggcgccggtttcgacagagaaggtgcggtcatcatcgacggatttttcccgtccggtggcggcatacaaaagcatggcatagggggaaccgacgatcaccaggttttctgcatcctgtatgagctttccgcatttcagattcaatacgtacgttttaataatgaattccttgcgccgtctgaaataagagctgcgctggaaatcgggattctgcctgcaaagagcggcaagaacctcatagtcgttggagaaattactgtttttttgcaggtaatttagaaacgctccgttatcctgtttgagccggttgacatattcaatgcttgtccgtgttacattatccatgatggcttcgtctaaggaattgaccatctgatagctcattttctgtacctcacccaatttgctctcatgggcggtttttacaatgccgaacatacagccattttcatgaaccttcctgcaccacgattcatagggaacatcaaatttcagccatttcatcgaattatcggttgtaatcagctcaatgtccctgacaaaatgtacagttccaaacatgtctgttacggttgcgttctcatatttatccccgaaatattccctgaaaaacttctggatatggcagcaaaagctggccattttgcagaaatggtgcctgagcaggatataaccgttgccccattccggaaaaatgcggctgtcgatcagcgcctggccgtcgaacagcgtatttttcagggtatagttcccgatatgctttgcaatgcaatgacggtccctgtcggtctccacgcttatgacgtctgtcataaaagtccgctccacgtcttttagaatcaggatattttcgggctttatttttaccttgcctacaatggtgcttgataccagaggggcataggcgctgatttcgacaatggccggattatctttgggcagcctgattcccatatatagaaattcccgggccttcttgtgcagtctgtcccggatgaacatacaggagcctttttttgccttcccggtgcttcgatagagcattttataatgtatcacttcgcgcttcgttatttcgccgctacgcttacgggtggtatattcgacgttcactccttcattatagaagattttacggatttcttctttggatcgtttgctgtacttttcctggttcagattcgccgcttgaatcagcgcggctattttctgtcttttgttcttcttttttaccgcctgctttctggtaccgcctgctttagccagcttgtactctgtccgggcagcctttgccagcttctttagatggaagatttcctcctcataagaacgtgaaccaaaattaaattcgaggcagataatatctctggtagagctttcattcagcagtttcaatccgttttccataagataatccttgaaaagactgttagtaaacatcgcgtttttatattcgaagtggtccctgactccattattgtattcatataaggtgcctgcctctatatttttgattctgattccgtatttacctgtcgtcattccagtcacatcctttcttatcaatccgttttattcttatttttgttttcctgacctgtgccggaggttccggcctcccgttcccttgcggcataatataaactctgggaaatgcggtttaaattccacggactgggccggtcggtgctgaaatcggcttcataaagtacgccggcaaaggttctgtgtaattcctcacggttttttttcatacgtttcactaatcctttcttgttctgttttcttaatctttcggatatgtatgatccagataatagttctctctttggcgcagaatatcttcgcagacggaaataccgatacggtaaacgtcatctttctctgttgtgaggctctgataatacttccaccaattaataatttctgaatccgttctctgtatcgtctgttcatataacaagtcgtaaataacggaagtggtattttgcttcaatttaactttctccttttacatttattatccggcggtcagcgtttgcaggctgtggttaccgggcgctgttatctatttctccaaagtaagtttgattgcaccgaaaaacagaaaacagaacatttgttcggaatgcgattgatacgaacatatgttcgtgatatactcgtagatgtaaataaatggaaataaaaaacttgcccttaaacggcatcaggcatcatgccgaaaaaagacaaggagggagagtatcaaaaagagaaaatgactatatgaacgatgtaaatgaaaaaatgcaagggtatggtatagatgaatacagataagattttagacgggtactataaagataatgctcagaagctgcgtgcgatagtagacaaactgctgagagattttggcggcatatcccaaaaagattatgatgatttttacagtctggccaatgcggtatttgccggggcgttaaagcagtatgacgccgcccgggatttcgatggatttctttactcctgtctgtcgaacaggattaaaacagagataacacgaaggaaccgtatcaaacggcgggctgacatgactgccatatcaatagatactcccatcggcggggagagcggtgcgacaatcggcgatacgcttcagtctgagtttgacataacaaaagagattgacagagaaaccggcttattccgggacgataaagtggtaagataccttgacagaataccggtccggacaaggcagattcttgagatgaaaatggagtccatatcggcatcggatatcaaaaagatattaaagctgtcggacaaagattatgagaggtcttaccggcaggcccggttttttgattatatgagtattctgtttcaggataccggcagggttagtaatttggaggaggttacagttatgcagaaatcgacacagacgttggagaaaagcaagccggacaagctttgcatagcatcgattaataaaaaaatagaacggcataccatccggtttgatcatccgttacagcgcgaatcggagcaatggagcccggccatgaagggaaatctgatatcagatattttacaggggaatccaatcccccactggtgtttgcggaacaggtggcgaacggactggccatcatctgggatttggacggcaagcaaagatgtacgacagcctactccttttcgaaggatgcttttaaaataactaagaatatcagacgatggctgatcgcataccagacatcggtaaaaggaaaggatgggaccgagatttttgataaatccggttttcctgtatatgaaaagcaggaatttgatatcagagggaaaaaatattcggagcttccggaagaattgcaggacagattcaaggaatacaattttgagatcgtacagtatctgaattgttcaagtgaagatattgcctaccatattgcaagatataatgagggcaaaccgatgaccgtatcgcagaaagggcttaccaggctgggagagaagtttgcaacgatggtcaagagtatttccggtatgccttttttcagggattacggcggttataaggtgtctgagggaggcaacggaaccgttaacagggtggttgtggagagcgtaatggcggccaattttctggaacattggaagaagaagcaggaggatatgtgtgaattcattaaagataatgcaacagcggaggattttgacagcttcgaggatttggtggagaggattacaagggctggaacggaagaaacatttaacatgtttgattcaaaagattcctttatgtggttcggcctgtttgccagattcgtaaagacgggatttgacgacagcagattcatagaatttatggctgaattttcccgttccctgcaccgcagggagattaacggaaagagctttgatgatttaaatgggaaagcgacaaaggataaagcggtggttctaaacaagattaatcatttagagaagctcatgaatgaatatttgggcaccggaaaggaagcggggccggttgatggagaaaagagcatattagagtttttacgagatacggtaagtccaggtataacacaggaagatttcagcttgtatcaggaaattttggaggatttatcgcttaatgtggatcattcttcgaaactgcttgaagaggcaaaccggccgtctttactggcgctggtcgcttattctattgaaatggatatggatctcgacatatggattgtagagtttttcaaaaagaatgccgcgtactgttcaaatcaggcagagaattataaaaacatggtgaaggagctgacggcgtatttccggaagctccattaaatactgatagcttgagatgggaaaaacccgtatctgcgaaggaggaacagatggataaaagatcattggaatttgtccgggaaattttaaaaatggaatgcccggagagaaggtttgttgagcctgggagtattgggaatatgaccgcatctatacggtcggcaactttatatacgggacagagcggggagaggagtttgccggcgcagagcacccgggcttcaagacgaaatattccgtcatgctgcctgtgaactggtaaaaaaagaatgagacacaggtatgatggaaataggtcgggaggtaaaaccggtggaatttattaatacggatgtatggggaattgaacatgccctccgctggtgccacaatctgcaaaacacctgggcaagaagcgacagcggattatgcaaaggcggtgacgatggaatcggctgtgtgcattgtgcaatccggcagcggtgttcccatttttataaccgtgagtttgtgcttggtataagagacatggaattaatgcagggacttatttgggcaggtggtgaaaaggcagagttcctgcggatgatacatgtggcggtggatttagtgacggacatgggaaaggaggcggaatggaagaaagacgctgccggaaaaatgggagatggtgccgtatgtgtaacgtgggatacgaattacgcaaaactgcgggaacttaacaaacagattagaaagcatggggacaggaatgttcaggcggtctccttcaaaagatggattaaagcgcttccatacggcagggagctgatagaatacgaaggagaggaacgccggaatggggagacgatgaatgggtaagcggtgaacaggcaaacgatgtttgccatgtaccgcccctctctccgccaatgagaagaggacaagtaatgagaaaaaggacaaaaccaaaacggttttgtcctctctgaatggtggtatgattcacggcagctacagatcctgaatcattgctctgttttccgtacttttcccccaggcttccagggcaagttcgtatgtatcctggactttctgttccagaactttgatatcctttttcagggacagttgaccggctttcagagctgctgtgtcactttccagcttgtcgagccgctgttcaacacggtcgagccgctgttcaacacggtcgagccgttgttcaacgctgtcaagccgtccctcaaccttaccgagacgttctgatatctcagtaaaaccggcttccatccgcgcttcaatgggcgcaaacagaccggcaattgcctgtaaatcgtctttggtcaaagacatacggtactcctttccgtgtctctccaactattcgaagtctccgcttctttacttgttttagtctagcacattatgagagtgatgtccagcatcagactttaaaattcaggcagccatttttcgcagaaaaatgagcggattgcgaatgtttttgaggattgtgagagcacgcagtgcggagcaatccggtatcaaagggggcaaaagaccttttgaccccaacatcatgacattggttcacacctcgttagaaagcggcgtggtgcgaacaataacacgctttacaatgaacagaaactacaaaacagacagaaaaaagtaagaatccatcgaggaatttctggtaaaatataactgtgctggaaataatccaatgtatctgcaatatctggaagaaatttcggatgcagttaagccagacggatcaacacagacaggaaggcaggaaagagaatgagcgagagaaacaggtggagttactttaagaatatctgcagacggtcatcacgtcaccggctggcgtcattgctgctggcagcggtttttatgatgacgggaactatgacatcgtcagcaggaccggctggcagcagtcagacaccggtgcagtcgggagaacttagaggagtctggatttcctatctggactggaacaaatggccgaaggattataacggcttcagacaggccgttgatttagcgatggatacctgtgcagccaacgggatgaacgcggtgtttgtccaggtcaggccggacggtgatgcaatgtatccctccaaatattttccgtggtcaaaatttgcatcgggacagcagggcaaggatcctggatacgatcctctggcctatgtcgttcagtctgcccatgcgaggggactgaaggtccatgcctgggtaaatccgttccgtataaccggatatttgaaccgttacagcgatctttgcagtactaacccggctgtcgtctgggcaaatgatggagatcctgccaatgatcggtgggtgctgctccaccagggagagtattattataatccggcagtaccccaggtgcgtcagatggtgatagacggtgtaagagaaattgtagaaagatatgatgtggacggtattcatttcgatgattatttctacccaggggtaaatgatggcgatgcggccctgtggtttgataaaccggagtatcttgtctcgggcagcagtatgagtatcgcggactggcggcgtgacaatgtgaaccagcttgtaaagggaatatacagtaccatcaaatccataaagccgggcgttgtcttcggtatcagcccggaggggtaccttaagaatctccgttcgaatacaagattatttgtcgatattgatacatggatgacgcagccaggctatattgattatattatgccgcagatatactggggctttgaagcaaagacaggaggacagccggctccctatgcatattccaattgcctgagagactggatagagcttaagaaaaagggcaatgtaaccctctatgcgggccttgcactttacaagacgggtactgatacgaaggacggaaacgaagtaccggaatggctcagatacaatgacatcatgagacgtcaggttttggagggaagacagagcggccaggtgagcggatactgtttctatgatttcagctccctgacacgggcaggggctgccgccgaagtggcgaatgtaacggcgttgtttaaataggactgttcacacggttgtgtatcgcggagcgtgttattgtccgtaccacgccgctttccggcgaggcgtgaacagtaacttaaatagacaggacaggcaatttcatgtaaactacaagttgataaaatcaaggcaacgcgctataatggcaaaatatggttattatggcgcattgcttttaaatcaactgtttacaggagccggacgatgaataaggataagaacgatttttcacagggaagtgtggttaaaaatatcatgagtctcgcagtgcctatgactttggcacagctaatcaatgtactttataacattgtagacagaatatacataggaaggattccgcaggattcaaccctatcactgacgggaattggcctttcgctgccgatcattacaatggtgatcgcgtttgccaatcttttcgggatgggcggagcgccgctttgctctattgagaggggcaggggaaggatcgaggaagcagagaaaatcatgggaaattcctttaccatgatggtgatatcaggcattctcctgaccgctttcggtttgatattcaaacgtcccatgctctatctgttcggagccagcgattccacctggccgtttgccgacgcttatatcacgatttatctgttcggcagcctttttgttatggtgggtcttgggatgaacagctttatcaattcccagggatttggcaaaatcggaatgatgaccgttctgttgggagcggtttccaatatcattctggatccgatttttatttttgtcctggatatgggcgtgaggggagccgccttcgccacgatcatatcccagtttttatcggcgctctggattgtcaggttcctgacgggggagaagacgatactcaaattaaagcgctcctgcctgaaaccggagctgaggaggattaaggcgatagtggggctggggctttccggctttacgatggcaattacaaactgtacggttcaaataatgtgtaatgcaacgcttcaggcatacggcggggatctctatgtgggagttatgacggtcgttaactcagtccgggaagtggcgtcacttccagtttccggcattacgcaaagcgcgcagccggttcttggctttaattacggcgctggggaatacggcagggttaaaaaggccattgttttcacagcggctgcagcgattgcctatacggtcgggatctggagcctgattcacggtttcccggaattctttatccgaatattcaacaaggacctgaatctgatagaggccggtgttcccgcgctgaggctctatttcttcggattttttatgatgtcgctccaattttcagggcaggccatcttcgttgggcttggaaaatcgaaaaatgccatctttttttctatattccgcaaggtgattattgttgttccccttacaattatgctgccggggatgttccatatgggcacgtcgggcgtatttgcggcggaaccgatatccaattttatcggcgggattgcctgttttggtactatgatgcttacggtatggccggagcttacaaaaatgcagagggagaagggaagagagacaggtggaattcagaatcaaaaaagcaaagcttaatgacgttcatgcggtggccgctttgatacgggccgtttgggaacagatggataaccgggaatggtttgtaatggatgaggcggatttcctgaaagatgtgctggaatcaggccgaggctttatttatatggccatagatgccggtacagagaaactggcgggagtcatggatattctgacgccgggccttgaaaaagataatctcggatatgatgccgggttccgggaagagaagcttctaaggacggctcacgttgattctgtggccattttgcctgagtatagaggaatgcgccttcaggcaatactgatggaggctgccgaacaggagctggctgtgaaaggataccgttatatgatgtgtaccgttcatccggataacagcttcagccgtaacaatatggtaaggcaggggtaccgtgcggtatgcagaaaagagaaatatggcggccgaatcagggatgtcatgttgaaggagcttcccggagtcatataacgtgaacggatcatttgattaattaaaaactttcggatactgcgccgccttaggcttgacaaatcaatttcgagtgctataatcaaagcgtaaaataaatagtataaaatgcgatgagaagaagagtaagacagggaaactgtccagagagaggcacggaaacaggtgtgattgccttacagcggatttgtctgaagaccggcttcgagtgtcccttaatcgggaacggtgactccgttatagtcatgaaacgataacctgcatgctttacgtacaggttaccgccttcaatgagaggtccggataatatccggtcaatcagggtggaaccgcgagaaattcgtcccttgatacacagattgtgtatcaggggattttttaattgatgacggtgacctgttcgcggaacgtgcaggttatcgtttatcaggaaagttatccagttaaaccgccgccaaagcggcccgccgcaggcggagattgtgctttaacgcaattttgtttattttgaggaaggagaagaaatgatgaaaataacattaaaagacggctctgttaaagagtacgaaaatcagatggcggtgatcgacatcgcaaaagatatcagtgaaggcttggccaggatggcctgcgcgggagagattgacggggagacggtggatctgcgcacgatagtctgccaagactgccggctagacattctgacggcaaaggatgaaaacggactggctgcgctgcgccatacagccagccatgtgatggcacaagccgtaaagcgcctgtacccggataccaaactggcaatcggaccgtcgattgcagacggcttttattacgacgtcgatccggccacgcctttgacggcggaggatttgccgaagattgagactgaaatgaaaaaaatcattaaggaaggccttgccctggaacgcttcactctttcccgggaagaggcaatagcactgatgaaggaaaaagaagagccgtataaggtggaactcatcgaagatcttccggaggatgctgaaatcagcttttaccgtcagggagaattcacggatctttgtgccgggccgcatctgatgaatacaaaaggcgtcggtaaagcatttaagcttatgaatctggcaggagcctactggagaggcagcgagaagaacaagatgctgactcgaatctacgcaacagcttttgccggcaaagaagaactggaaagctacctgagaatgatggaggaggcaagaaagcgggatcacagaaagcttggaagggaactgggccttttcatgatgcatgatgccggccccggttttccgttcttccttccaaaaggaatggagcttaagaatacactgttggaatattggaggcaaattcataaaaaagcaggttatgtggagatctccacaccggttattttaaataggaagctttgggagacgtcaggtcactgggatcattataaagataatatgtatacgacagtgattgatgaggaggactatgcaattaaaccgatgaactgtccgggcggagttctcgcctatgcgtcggaacctcgttcctaccgcgatctgccgcttcgaatgggagagctgggtctggttcaccgtcatgagaaatcgggccagcttcacgggctgatgcgcgtgcgctgcttcacacaggatgatgcccatatctttatgacgccggatcagattaaggacgagataaaaggcgtggcccacttaatcaacgaagtgtattccctgttcggctttaaatatcatgtggagctttccacgaggccggaggacagcatgggaagcgatgaggactgggagatggcgacggaaggcctgcgtttagcgcttgatgaactcggccttgactatgtggtaaatgagggtgatggtgcattctacggtccgaaaattgatttccatctggaagattcaattggaaggacatggcagtgcggcacaattcagcttgatttccagctgccgcagcggtttgaactggaatatacgggtgccgacggcgaaaagcaccggccgattatgattcaccgcgtggcctttggttcaatagagcggtttattggcatcctgatcgagcattttgccggagcattccccacatggctggctccggtccaggtaaaagtgcttcctatctctgataagtacgcagattatgctaaaacagttctggaggagctggaagaagccggaatccgggcggagcttgatacgcgttccgaaaagatcggttataaaatccgtgaggcccagacacagaaaattccgtatatgctggtagtagggcagaaggaagaggaggaaggtaatgtctctgtgagaagccgttttgccggggatgagggaagcgattccacagctggttttattgagaaaattaaaaaggaaatagcaggaaaagagatccggcaaatcgaggcaaaagaggaaaagtagagaccgcaggaaacgaataatctctatttatattacgcatactactcctgtatcaggaagactgagaatatcagtttttataaaagataaaatcaagaaacaggaggaatcaaccatgacgaaattggattgtaatgtaacagggtgccttcataactcagaaaactgctgctgtaaaaatgtgattgtcgtagagggacagactgccagagaaaagtgtgacacatgctgcggcagctatgatgaaaacaagggcggcatgttccgcaatatgttcaaaacccctgagaacagattggaagtagagtgtgaggccgtgaactgcgtatataataaggatcgtttctgcgaggccgaacatatcggcattacgggcggagacacaaccgaagcgcagggaacggaatgttccagcttcaaagcccgctgagcggaataaacaataaaaattgcaacaataaaaattgaataaagggattgacaatccgggaatagtgtagtatagttactgatgttgtacttaaaacaacacgacaggaaagcaggtatccgcctcaccctggcacgagcaagtgaccaagggttcatatttagctgaaaattccttaattggatttcctattatgataagtggatagtctgtctatccacttattttttgcagtctataaatattatcatgtgatgggggtgcacgactattagcgatttaatgattaacgaacagattagagacagagaggttcgtttggttggcgagaacggagagcagcttggaatcatgcctgctaaagatgcgttaaagcttgcaaaggatgcagagcttgatttggttaaaattgctccaacagcaaaaccgccggtctgcaagattatcgattacggtaaatacagatacgagctggccaggaaagaaaaagaagccaaaaagaaacagaaagtgatcgaagtgaaagaagtgcgtctgtcaccgaatatcgatgacaacgatttaaatactaagattaacgctgcgagaaaatttatcgaaaaaggcaacaaggtgaaggttactcttcgcttcagaggccgtgagatggctcatatgtttaagtcaaagtacatccttgacgattttgcagaaaaactcgctgatatcgcaacggttgataagcctgcaaaagttgaaggaagaagcattgtattgtttttaactgcaaagcgttaaaatagacaaatatctaaggaggaattttaccatgcctaaaatgaaaacaagcagagctgctgctaaacgttttaaaacaacaggaactggaaagttagtaagaagtaaagcttacaaatcccacatcttaactaagaaatctacaaagagaaaaagaaatcttagaaaagacatcgttaccgatgcaacaaacagcaaggtaatgaagaagattttaccatacttataagattcgaggattaagaaggaggaattaactcatggcaagagtaaaaggcggattaaacgctaaaaagagacataatagagtattaaaactggcaaaaggttacagaggtgcccgttctaaacagtatagagtagctaaacagtctgtaatgagagcattaaccagctcctatgcaggacgtaaagagagaaagagacagttcagacagctctggattgcacgtatcaatgctgcagcacgtatcaacggtttatcctacagcaagttcatgtacggcttaaagctggcaggtgttgagatgaaccgtaaggtattatccgacatggcaatcagcgatgcggaaggatttgcaaaactggcagaactggctaaagcaaaattaagctgattttaataaccgagaaaaataagtgaccggaacattttgtcgatagataaggtgtttcggttttttttgttgtgaaaaagtaaaagcactttaacagcaacctggtttgtgatataattccgctaagcgggtattgtttctcaaatctgctgaggaggggaaaatataatgaaaataaagataacagccgccgctctggctgcctgcctgttcatggccggctgctcaggagcggcatcagtgaatacgtcaaagaacagcgagccggtagatatcacgatctggcattactataatggttctcagaaagcggcctttgatgacttggtaaatgagtttaatgacacggtaggaaaagaaaaaggtatctatgttgagggacatagcaaaggaaatgtctcagagctggaaaatgccgtcctttcatcgagcaggaaagaggtgggaagcgaggagatgccggatattttttcttcctatgctgacacggccttcgaattggagaaagagggccttttagcagatctggccccctattttacggaagaggagcagaacagctacatggattcctacatagaggaaggaaaaatcggactgaacggtgagcttgagatattcccggttgctaagtcaacggaaatcatgatgatgaataagaccgtatgggacgagttttcggccgccgcaggcgtgagccttgaggatttaaagacgaaagaaggagtggtccgggtagcggaacgctattataactggacagacggcaagacaccggatatcccatacgatggaaaagcgttctatggaagagatgctgtggccaatctttttattatcggctccatgcagcttggcgtagagctgtttcatgtcgaaaaccagcaggtaacgctgcagattgataaagatgtcttcaaaaggatttgggactgttattatgtcccatatgtgaaaggatattttggggcctatggaaaattccgctccgatgatgtcaaaatcggagaactgattgcctataccggttccactacctcggccggttattttcccgatcaggtagaacagggcgataccataaccccgatagaatgcattgtgcttccggttccttcctttgaaggcggagctccttatatcgttcagcagggagccggaatggtggttacaaatggcccggacgataaggtgcgtgcggcctgtgaatttcttaaatggtttaccgattctgaaataaatacggaattcagctgctcgtccggttatcttcctgttaagaaggaggccaatgcgatagacgtccttgaaaaggtgatggaagaaaatcaggttgacatgccgcaaaaggaatatgatacgctgacagaggcttataaactggttaagaataaccagctgtataccaataaggcttttgacggcggaagtgacgcaagaaaggttttggaatacaatttatcggacaaggccgctgcagacaggcagcaggtggaggcgcttctggcagagggcagcagcctggaggaagcggtggaagactatatttcacaggaatcatttgactcctggtttgcttcgataaaggaagagcttgagtcctgtgtggaagtcagcggggcagggaagacgcagtaagccggaatgcaggcaaggagttaaagatgcgcaaaaagaagacaattctcaggatgtttttgataccgctttcagtggtaatgcttcttcaggcggcagtggccttcggggccgtacacatcggagggacggtaaagcatttagatgaatattctgtggggattatggaacagattgtaaaaaacagaaatctgatcctttcaaataacatgacgcaccagtggacggatatatccggcgaatatggaatagcgaactcctgctttgaagagattttagaggaaagaaatctgacgctccgtgagtttatggaagacgaagaggcaaaaaatgagctgttaaaacaactgctgctcccagggctggatattttaagaagaaacggagtgaacggggtttatttcgtgctggcagacggcctgaaggaaccgcagaaagagaagggaaatgaggtctataaatgcagcggtatctactttcgtgattcggacccttacgtaaatccaaaggattattccgatctccttatggagcgggggaattatgagttttcacatgagctcgggattccctttgatacctcttggacttcccggtttaattttcagcgggacgggctgctggaagccgataatttcttctataagccttataacgccgcggtggccaatccaaaagccaaggaagagaatctggcttattggggcagcaccttttatctggaaaataataagcaaaaggattcatacagcatgattagctattcgataccgttgatcagtgagggcagggtatatggtgtcatggggattgaaatatccacatcggtcataagcggccttcttcctgtccaggaactgaatgcaggggaccacagcggatatttgatggcgcaattcgacgatgacggcaatttgattccgttctttctcagcggactgatactcaagagaaacatgacggcatctcagcctctgaaattgcaggaaacagaatatgcaggactgtatcagatagatatgcaggagaagggggcagattattacgcccaggtgataccgttttccatatataatcccaataccccgtttataaataatggctgggttttgatgggagttcagtcgggcgacagcctatttggtatgggcagcagggtcacgcgcaatattgccctggcggtgctgatttctctggcggtcggtattacttctatctgcctgctgatgcattacctgacacgtcctattacgcagcttgcggcttggatccgcgataacaaggaggacggtccgggggactatgggaaaacagaaattgccgaaatccgggcattatacgatgctgtttcagacttgacggaaaaacagaagacagcggaggcgaaggcggaggaagaaaaagagcggtacctgctggcgctgcagagcagcacggatattatttatacgtataatgtggaagataactcggtagatatttataatctgcttgccgatggaaaaaagagcggccttggcacccatatcagcaatctgacggaaagcattcagcagagtaagatactctatgacggagatcgccagatgatgaagaaaatgttcctgaggctggatgagaaatttgagctggatttcagggccttaacagagaagaatggctggcagtggatggaaatctccggaaagacgatttgtgatgtttccggcaggaaaagcaaagtaataggaagcatacggaacatacaggaacaaaaagaaaaggagcagatggagagtaaagcggcccgcgttgatccggtgacaggcctgtacagggaaaaagtagggcaggagattatcaaagcggaggcgcagctcggacggaccggttttatgcttcttatggatcttgataagtttcaggagatgaacgatggctacggtatagaatttggtgattcaatcctggaagagataggcattttcatactgaaattaaagtcagagcttgagaagtcaggaaagcgtataattgccgtgagggcaggggcgatgaaatcctgatgtggctgcgcggttttgaaaaacaggagatactgggcatatttaacagattgaaccatatgctgtcacgcctgtgcgatcggggtgagttagatatctcggtaacagcggcggccacgttcctggacgggaagcaggaggactacgcgaggatgatagagaggctgcgtaccgctctcggctatggaaaaagacgcagaaagtcccagttaaccttctgcgaggatgtgcctgagtctgaatgtatcgaaaaacgggattataatgagattgcaagtaatggaaatgtccgcgctctgaatatggtaaccagagtgtttaatctttttgacagaggcgggcaggtgggaccgattatttcggttttgtttgcaaagcttggggtacatacagggtttcggatattctgatggcagacatcaggtgggatttcaatgcttccggaatatataagcaatggcatcagcaggaggacgctgaagaggacacggcggtttaccattttaaggccggagctatggaacggtgttccgggcattttgtctccggatatgtgaaattcgaagaaaataccgtatttacaacggaggaacgccgtattcttcatattccgcttaaggcgccgggcctttgtattccaatgtatgacggcggcaagctgatgggagcggtcagctttatccgcaaggcggaacacagtgactggagcgtggaagaatgctcggagctccaggaagttgtgaagattatcgagacaaatattaacagggagagatatgatctggccagccgtgccaagagcgatttcctgtccaggatgtcccatgagatcaggactccgatgaatgcaattatcggtatgacggccattgcaatggatcgcgcaaagcaggaggaaggagtgaaggaatgtcttattaagattgaccagtcctcccagtatctgctcagcctgattaacgatatactggatatgtccaagattgagagcggcaagatgaaactggcctgcaataacggcagcatcatgaaaatggctgaagagatagacgatctgatggaaagccagatgcggcagaagaacatcacctgcatccgcgatatacaggtggagaatccgtgggtttatgccgatttgatgcgtttgaagcaggtaataatcaatctgttcagcaatgcggttaagtttacaaatgaaggaggacagattcggttctccgtatatgaacaaaagatggaaagacgtcagccggaggatagaaatgaagtagaatttttctttgctgtagaagataatgggattggcatcagtccgcagaaccgggaacggattttcaacgcatttgaacaggcggaggatgatacggctgctgcatacggcggcaccggtctggggctgtctatcagcagccggcttgtccggatgatgggcggtgagattgggcttgagagccgggaaggagaggggagccgattcagcttcacgctccgctttatccgggcggaagagccggggacaagtgtacttccgggacagaatacgggggaatatgattttaccggcaggcggattcttctggtagaggataatgtactcaatacggagattgccaaaacactccttgaaatgcatggctttattgtcgatacggcagggaacggtaaggagggcgttgataaatttgccgaggcttcggaaggaacttactgcgtgattctgatggatatcaggatgccggtcatggacggtctggaggcggcgaagacaatccgccggatggcccgaagggatgcgcagagtgttccgattatcgcaatgacggccaatgcatttgacgaagatacgaagaaatccatcgagagcggcatgaacggccatctggccaagccggtggatatccaagagctgctgagggcgatacaggaagtgctttaaattcggcccgctttttagcgggccggtaacgggttatcacattgcgtctgatgttcaataattttgtagattctgtgcaagggaaggcaaaaaaacgcaatagttaaaaaaattaaaaaaatttgaaaaaagtggttgccaggttccaaactttgtggtatactaattttcgttggtgaggcaaacaaaatcaccgaatgcgggagtgctggaattggcagacaggcaagactaaggatcttgtgggtgtatgctcgtgtgggttcaagtcccatctcccgcatgatgcagaagtggcggaattggcagacgcgcacggttcaggtccgtgtggtagcaataccgtgagggttcaagtcccttcttctgcacgataacagaaggcagcttttcgataagaaaggctgccttttttctgtctaaataaaaataatccttttaatccgctctatgaagcggaaaaacaaaaaatatttcaggttagcaaaagtaaatcttccggtaaaacccgcagccaggacggtacaggcggctgggaagatgagccggaatcctttttgacggtccagcagagattgttctcaaggcagaattcccagtcgaaggggagaggagacaccaaaggagcgtttaccggtatcagattggcgccgggccgttccttccagactgctgcagcttcctcacttacaggaaccaggcagtgcggccgtatggcgacggcctttgtctgctccgtggttttttctgcggttgtcagcgtcaggttccagtcgagtgccagaatccggttatctccaagtctgcgcacaggagatatatttctgcagccggtcagccgcgccgcctggtatttgcccggattatcaaagacatctttcgtagctccgctgcagaggacctgtccctgatccatgatgatcaggctgtcgcagagctggtatgcctcatccttatcatgcgtaaccagtatggaaagaccgtgataatcgcgcagcacatgaagcagctcaagacgcagcacctctttcagagcggcatccatggccgaaaaaggttcatccagcagcagaagagccggggaactggccagtatgcgggccagtgcggccctttgctgctgtcctcccgacaatttgccgggataataattttccaggccggacagccggaaccggtgaatgcaggcagagattattttgtcccgttccctgtttttgggactgattccggagccgacgttttccgccaccgtcatattgggaaacagggcatagctttgaaacagatagcctgttttacgaagctgcggcttgcggttgatccgttccgcggacgaatagaaggttttgtccccgaggaggatccgcccgcagtcgggcgtaacaagaccggcaatggattttaaccccatgctttttccgcagccggaggggccgaggatacccaggcagcctcctgtatgctctagcttcagttccagcgtataatcgtgcagttttttctttatgtcaacagtcagcgtcatgtaattttctcctgtgtttaatttctccattttgtattcccggcccggctcatcagcaaaagtgaggcaaatgcaaataccatcagaatcccggcataaacgagtgcagtatccatacggccggatgctgtttcggagtagacggccagagggagggttctggtacgtcctgcgatattacctgccagcatagctgtggctccaaattcgccgagtcctctggtgaaagccaggacactgccggagagcagcccgggaatggagttcggcagcaggatgcgcagaaagatttttgtctcccccatgccaagagttctggccgcatccagcagatgcggatcgacctgttcaaaagcgccgcgggcagagcggtacatcatggggaaggagacaaaggccgaggcaatcaccgtggaggcaaaggaaaaggcaattttcacgccgaatacatcgagaaaaaatcgccccagcggacggttcacgccaaagagacagagcaataaaaggcctgccactgtagggggcagaactaacggtaatgtcagaagactgtccattacgattttcagccgctgcctttgaatattcataacctgccaggcgagtagggttccggcgggaaagacaatgagcagcgcgcagactgccgttttcagcgaaataattacaggtgagaaatccatacagcctcctattgaaaacgtttacggagtgatacttatgttcggttattccggcagcggggagaaaccataggaagaaaaggcatcctttgcttcactgcttttcagatatgccagaaaaagttctgcaccgtcccggctgccggagccggagagaattgcggcggggtacaggacacgctccgataagcttccttccggagccggggcgattacttttacccgctgtgtggttgcagcatcggtggcataaacgattcccgcgtcggcacttccttcggctacccagttaagaacttccgtgacatttgtgccaagactcagtttggtgttcagggaatcccaaagtcctgtctgggtaagcgcttctttcgcatactgtccggccggaacgctgtccggatctccgatggcaatgacagcagctttttcaatatcggtaaaggagccgtagctgtcctcagaaccctccggtacgatcaatacaatttgattttccaggagcattgtgacggaagccgaatctaacagccccttctcgttcagagcatccatctgtttcgtggcggcggacaggaacagatcggcctcaagaccctcctcaatctgtttctggagctttccggagctgtcataggttccggttacggtaaagacagggtgtgatttggtaaagccgggaatcaggacttcttccataaccggcttcaggctggcggcagcagcgatgaaaatttccccgccctgttcatctccgcccggtaccgggctgtcagccatttttgcctgtcctgtgctgcatgcggtcagggccagcaatgagagcattgccgcggaaaggacggccctcctgattcctttacagattctgagttctgttgataaattcttttctcctatcttgcgcattctgttgcacctcctcttaaaatttcaagcccgtggggcagctcgttcaatataaaaccaatactttcccggaccgccttcggactgccgggcagattgatgatcaatgtttttcctctgattacagcgacgccgcggcttaacatggcacgctttgtcacctgcatggaaaagctgcggatcgcttctgcgattccgggagcattacgctgtgccacagccatggttgcttcaggcgttgtgtctcgcggggagaaacctgtgccacccagagtcagaatcagactggcctggcggctgtcgctaagacgtatcagatgatgcttcagctctttgggctcgtccggaatcagaaaagcctcgatgacccggtatccggcatccgacagcagagatactgcagctgggccgctttcgtcaacccgcagaccgtccgcacccttatcgctcagggtgatgaccgctgcggtgaagggccgtttcggtgaggggggaaatgcgagaatttcatcaccgggagtcaggcgtccgcttttgagtacccgtgcgaatacgccccggaccggcataatgcattcgccgactctgtgatagatagagcaatggcggtggcattccttgccaagctgcgtgatttccaggataacgtttcctgctttaagggtggaacctacctccaaagcggaaaaatccacaccgtccaccagcaggttttcaccaaaatccccgtccgtgacaccgccgcccttttcattaaattcccggacgcgttcagcaggcaggaggctcacctgacggtgccattttccggcatgggcgtcgttgctgatcccgtagtcttccagaaaatccccgcagggcacgggatgcttattggtgcctttcttttcgctgatacagattgcttttataactcccatcaattatcctcctatttttgacatgcttttatgctcagctccgctttgttttccgccaaaacagtgacagggcggtttttggcttaccgtgcgtagaatagctttctgcagggcgtctttatatccggcttgcctgaaaagcggtttgatgcaaatgttgctttcaaatcccagacatcctttcagaaaaccgtcggcggtaagacggatacggttgcagcttttgcaaaagctgccgtgtacggcgctgataaaaccgatgcagccggtaaaacccgggatgcggtagtagacggcaggaccgaatccgcgttcactttcctccggcttaatgtcaggataccgggaggacagaagtttcagtatatccaggtgattcagggcaggcatgggggtgcttccaaacggcatggcctcaataaaacggacatcggctgggaaactgcgggccatctcagcgagagcaagataatcggtgacgggtacaagcccatccatgattacacagttaattttaatggggattcccagcccggcggtactgcggatggaatctaacagttccggaagacggtctgaaccggtgagggccgcgtagcatgccctgtcaggcgtatccatgctgatattaattccgtcaattccggcttccttcagccgtccgagatgttctctgagaaggagaccgtttgtcgtgagagtaaccgtctcgatgccggatgttttttttagcttttccacgatggagcagcagtccgttcttagaagcggttctccgccggtgattttgatatgccggatgccgagaattgcggcctcacggcagaacgcaaggatttcctcagacgtcagcagtgctttcctgctcagaaacggggaattttccggacggcagtaggcacagtttaaattgcagcggtctgtgacggagacgcgcagataatcaataattctaccgtagggatctttcaaacacaccgctttttcctcctgatttgcggagaaggcaaatctctccgattgtcattgtcttgtccacagccttgcacatatcgtaaattgtcaggagagcggcggatacgccggtcagcgcttccatctccacacctgttttgccggtggtccgtacggtgcagaccgctttgatttcgcagtctgcctcatggatggaaaatctgatttccgcataagtcagattcatgagatgacagagaggaatgatgtttgaggtctgtttaagcgccatgattccggcaattctggcaacgcccagtacatctcccttttttatccggccggtactgacccgttccagacactcgcgcgtcatagagatccttccgcctgccgatgcttcacgtacggtatcttcttttccgccgacatcaaccatgacagcttctccgttttcgttaaaatgagtgaattccattgctacacccccttgccgaagccgcagtttggaaaggtacagaccggacaggagaggcataatccgccttcgccaagggaagcgagatcctctggcgtaacggggtcctccgccatcaggcggggaaggatgagatcgaagatcgtgcgttctgcatacatgacacagcctggaaggccgacgatggggacggtgcgtcctccgtattcgtagtaggcgagaaggaacatggctccgggcaataccggtgcgccataggagacgatatgcgccccggtgtttttaatggccagcggagtctgatcatcgggatcgacactcatcccgccggtgcagcagacgagttcggccccgttttcaattaattcaataattgctttcgtgattctttccggctcatcgggcagagtgatatgaccggttacttccgcgttataatctttgagcttctgtataataacaggagtaaaggtatcggcgatgcgtcccctgtacacttcgtttccggtagtgataatgccggcttttttcagcgtaaaggggaggagggagaaaatgggttctcctccggcggcctcctttgccttatccatggaatccatggggatgacaaggggaatgattctggttcccagcagcttgtcaccggcccttacggcagtgtcaccatggcgggaggcaatcatcatctgtccgagggaattgatggctttcagcttgtcacggcggattttaaataaaccgctgcactcggcagtcagctcgatttttccctctttcactcgggaacgtttcatattgtcatttaagcaaatactgcaaagtatctcggcagcttcgttttcatggagcatggtttcgtcattatcccatatgtacagctgttcttttccaacgcttaacagcaccggaatatcctcctcagcaacaatgtggcctttgcggaatacggcatcctttgttacgcctttaataatctgtgtgatatcgtggcagagtacggagccgacggcatcctctgtctttatcaatctcatctgttttcctcctgtttcttcttctcctgagtaatatttgtctgattcagtccgctgcggactgctatcagctcggcggcaatactgacagcgatttcagcgggagtggaggcaccgatatttaacccgatgggagcgtgaacgcgttccagctcctcggtacggaatcccatatttaacagcttttgagttaaaacggatttctttttgcggctccccataacaccgatatagagagagggggagcgcatggcacaggcctgggcctgaagatcaaatatatgtcctctcgtcatgatgacgaagtaattcccggcggcaggatacaggctttcctccagatggtcaaaggagacaacggcggtgccgaaggcatccgggaagtcctctattcttagaaattcctctctgtcgtcataaacggcgcaggaaaatccgaccctcgagagcagaggaaccagctccctcgccacatgtccgccgccgaaaatgtgaaccaggctgtcggacgcaatcggttccagataatattccctgccgtccgatacggtggtgcctggctttccccggcggcaggcgtccgtgacagacgcgggaaccttcggcggaagaggaatatcagggccgaaaatccccataaattcccggccggcgccgcggccgcgagaaacagagcggtccgtgccggcagaatgagcagaggaagcggaagtttccggaagttcgagtaccagccatagatttccgggcgcctttagcaggggcagggcggtacggcagagggattttacatcttcccgctcaggaccgatatagtggaatgccaacttaacccttcctccgcagaccataccgatcccggaggagggctcagacaaatcatattcccggcatgcggaagtctgttttaagagtagacgtgccgcttcgttctgggcttcatattcaatcgggccgccgccgaccgtacctgtgatccgtccgttccggccgaccagcattctggcaccggctcccctgggtgcggatcccaggctgtcggtaacggtgactgccattacgccgttcatattttccagctctttcagaagcgctgtcaggtaaagtgttatttcattcattgcagatcctccccaaaatatttatcaaagcaggctttcgcataagccgttacttcctcatcatacgcagtaaaacgttccagaaaagcctcaccttcccctgtcagggtggtggccccgccgtcgcttccgccgggccgtctgtgtatggcggtaatgccggcctgaagctccaaatcgttcaggatattccatcctttactgtaggacaggcccatcagtccgcaggcctttttgacggagccggtctgccggattaaccgcagaagcatggctgcggtgcggtcaaagaagggcaattcccgttccagagacagactcaccagcggaagaaagggttgttttctgtggcgttccagaagctcggcacagtcagtggaaagctctgcatcaaacaggacgccttcgtcgggaacttccaccagagtgcgctgatacggagagaggcggagggcttcacgcagaccgccgttcccctcgtatccaagaagaaacggctggatatttgcaccaagtaagagaggatgtcctctttttttgttgatctgaggcacggcagattccgctccgctttccagcagaagcagcacggtggacacggtaaaaagcggtatgtcggccggggtaaacagcacagggcagttcgacgcggccagataggccagaccgatgcgcacggaggccatcatatcggaattttcccagtcctcattacggagacagatggcgccgctgcgggcaagatggcgctccagttctctggcttgatatccggttacaacgacaatatccccggcgccggcctgccggaatgtatgaataattctccgtatgacagacagtgagccgaggggatcggatacctggaaactgtctctccggcgcggcttaccggccgctgcaatcagcgcgtgaaatgtcggaatactcatcgttttacctcctcaaaagttttttgattcgttcataatcctccgttgtatcggcatccgtgaggatgccagggtcggagaccgcaagcatcaaaggctttatggatagcccatttagcgccccgcgcagcccgtctgtcccgtcatgctcaagcagcgcaaaaagcatggatgaggagacgcaaacaggatggcctttccgaccgctgcagacaggaataacgatatctgcctcctgccgcgccatgcaggcgatagtctcggaagagacgagcggtatatctgccggacagagaaaaatcttatccgggagcggcgctgcctcctccttttggagagagagaaggcccagacgcagcgagtcaaacatctgtgatgtccgataggcggagttatggaccagacggacgggcagcccgcccagatgagaggcaagtgttccagccatgtagccggtgacgactgtaacgggaagggaaccggctctgacaaacgcgagaaccagggaacgggatatgctttcttccccgagaggaagaatcggtttgaatgcacccatccgggtagataaaccggcagcagcgattacggcggtaaaggtattagtcggacacataaaatttaacctccggataaattttgacagactgtttcgtcagaattggaacgagtatatcattatttgtggcaaattatcaatattttattttaaaattgtgtgatatgacaatataattgaagggaattggggaatttaggttaaaaaatatacaaaatatacaaatagacaacaaaaatgcttacgagttattttgaaaaagaattattaagactggtttgaagaataaaacaggccgcagaatctgcttgtatttggcaaaaatagccggatatcggtgtaaaattttgaaatttaacggtatattttgatgtttgctgaataatatttacaggattcaacgctttttcaacgcagcgctgctatactatacccaacaggtaaatgaccccattcgggatggcagtataaaaagagtggattccaaagacggaacggaagttgaggtggattatgaagttggtctgtacaataaacggtgaaaaggtagagagggaggctgacccctgtaaacggcttctcgattttctcagggatgactgcggtctgactggagtgaaggaggggtgcagcgagggggaatgcggagcatgcactgtgctgctggatcagaaggcagttaccagttgtaccgttttcaccggtcaggtgatggggaaagagattataacaatcgaagggctggagaaggacggagagctggatgtgcttcagaaagcttttatagagaatggtgcgattcagtgcggtttctgtacgcctggcatgattctgtcgtgcaaggcacttttgatggagtaccccaatccgtcggatgagcagattaaacgggcgatagagggcaatctctgcagatgcacgggtatgaaaaaatcaggacagccgttagagcggccgtgaaggagggagtcaattgaattttgccatgcctaagacgagagaagagcttgcccgggctctgagagaaaataatggcgcattgctgtgcgcgggcggaacggatttgatgatcaggctgagggagaaaaaacagtttcactattccctaatcgacctgacccacatggctgagatggccggaattaaggagacggaaacctccgttataatcggtgccgccgtgacaatggatgaactggaacgcagctccctgatcaggcggtatctgccggccctatccaaagccgcatcaatggtcggctccacacagatcagaaacagggcgacaataggggaaatgtggcaaacgcttcacagagttccgatttaactccggttatcctggcctatgatacacgtgcggcggtctgtgacagtacgggcggtatcagaatgctggcggttgatgagtttgtgaaaggcctcggcaggacggagcttggagagacagatgtaatcctgtggtttgaggttgaaaaaacggctgccttttccggctttgcaaaggttggctcccggaaagcagtagccatttccaaaatcaatgtttgtgtcaaggcggatattgaggatggaatactgaggaatgtttccgtgtttctcggagcggttggccccaaggcaagacgttccccttttattgaactggctctggaagggatggaactttcccgccgggatgaaagagtcctcaaggaagctgtttacgcccagattgaggataatattccggacagaagctcaaaacattataaaaaacctgcggcatatggaattatctgtgatgcactggaagaaatcaagtcgcagacggaaggaggggagcgcggtgagtgaactggaatatgtggggaagagatatgtgcgcgaagatgcgtatgacaaagcgcggggaagaaccggtatacatgtgacagaaaattaaccggaatgctgtttgcaaagctggtactcagtgaaaaggcacatgcgagtgtgcgtatccgaaaggaaaaagcgctgagcgtaccgggaatcagggctgtattcacatttgaggacgtaccggcgaaagcctacaatcctcataactggtccgcctgtattgattctccggaagaccagtacatactgagcgataaggcaagatatgtcggagatcatctggcgcttgtcgtgggggaatccaaggcggcggtggaggaggctgtgagcctggtcgaaatcacatacggggaggaggcgccggtaatcggcctttcgtcggccagagagacggaaaatgcgctggcttttgagaaggaagtatcctttggagaatatgataaggccgaacgagaggcagccgtcattgtgacgacgtcgggaagcacccagaaaatccatcacggagctctggagtcccatatcgcacttgcggatattgatgaaaacggaaatctagttctgtggaccccatgccagacggtatatcaggtgcgctttcacatcagcagcctgctggggctgccctatacgaaaatccgggtgatcaaagcggtgatgggcggatcctttggaggaaaaggccagactgtggtcgagcctgcctgtgcatttgcctgttggaagctgaaacagcctgtgatgctgtatatggaccgcgccgattctgtcatagggacgagaagcaggaacgcctgtgagatgaaggtggagacagccctgaccagggaagggaagattctggggagaaggatagctgcggatatcgacggcggcgcctattatacaaatgccgccgcagtggccatggctatggcaaagaagctgttccggatgtaccatatggaagcgcagacctgccatgtgagaacctttttcacaaacaccatcccgggaggagcctgccgcggatacggctcaccccaggctcacgccatcacggaagtcaacctcgacctggctgccagggagctttcaatggatccctgtgaactgcgtttaaaaaatgcggcccagccgatggatcccgacccgacgggaggaatgaatctgggaaatgccaggatagaagactgtatcaggacaggaatggaagcatttaactggaaggagagaagagcgaaagtcagggaaaaaaatacggaccggtatgcatggggcgtcggaatggcatgcggagcccacggaaacggatacaagggttcatatcctgagttcacgaatgtgcagatgatgatgcatccggacggctccgtggaggtgagaatcggaatccatgatcagggctgcggtacggttctgaccatgcagcagatagcggcagaagcgctgcacatggacgtatataaaatcaaggtatatgaggcggacacttacattacaccgtatgacgccgccggaacacaggccagccgtgtgacctacgtatgcggaagggccgtgcagaaggcgggagaggctctttttgaaaagctcatccgggctgccggtgttctctacggctgggacagggaggaagtcagcgctgcggacggacagctctgctgcagaggcgggagcaaatcatacggagaagtggccaaagaatatgagaaagcctgttcccggtatctgcgggcggagctggaatatgagccgccctccaaccccggttcctacagcagcgcttttgcagaagtgaaggttgataaatatacaggcctcgtggaagtgacggacttgctggccgtacatgatgtggggcagtgcatgaaccgtacgctggcggaagggcaggtcgagggggcgcacagatgagcctggggatggcgctgtgcgaagagatggtatacgataagaagggggcaattaagggacgtaatttttcaaaataccatatgatcaatgcccggatatgccgccggttaaaagtattttcatcgaaaaaggagaaccggacggcccttatggcggcaagagcatcggcgaattggcggccgttgcaccgggaccggcagttgttaacgcaattaattttgcacttgaaggccggttttccgattatccggttacgccggagaaaatcatagcatttttggagaaagagagggaacggtagatggataaggggaggatacgccttacgggggatacgctgactctggaagagctggagcggattgctgtttacggcgaaaacgtcgaggttgtggaggaggcgtgggaacgcgtgcgtgcagccagaaaattgatatttgacctcgataaaagaggggttgcggtatacggcctgaacaggggcgtcggctggaataaggataaaaaggtttttgcccagttttatgaccgttataacagaaatcttctgaggagccatatgattggcgtgggcctgagtgcagtcaggaggaagtccgggctatgctggctgtccgcctcaatggttttctgtgcggtcacacgggagtgtccgaagaaattgtggaatattatctggaatttataaaccgcggaattcaccccatcgtaaaaaaacgcggttctgtcggggaggccgatatcggcacattgtcggggattggtcttgtaatcatcggtgagggagaagcctggtacgcgaatgaacggatgagcggaggcgaagctcttaaaagagccggcctggttcctctgcttttagggccgaaggacggcctcggagtcgtatcgtccaatgcgcagggggcggcgtttgctgctctggggctgatagaggcaaaacggtttgttgaacggtaccggtacgtattctgtctcgccctggagggactgaacggcgtgatggatcccatggatgaaacggtaaacagggaaagaaaattcagcggtcagattgaatcggcaaagaaatgccgtgaaattctaaagggaagctaccttctggaaccatcgcaggaacgcgcgcttcaggatcccttaagcttcaggggcagagtgcggtcacgggcgcggtgacggatgccctgtcttatgcagaaaggcagttagagacggaactgaattcgaccgacgacaacccatgtctgcttccggaagaggacaggatgtgcggaagcgccaattttgaaccgctttcctgggtgcttgcggtggaaatggtatccacaggcctggctcatatgtcgaaaatgatttgccagcagcttttaaggattggggatccgggttttacaaagctgaaccgattcctgactccggaggaaggcgcggttatcgcatacggcacaattcagaagacattttcctgcctggatgctgaaaaccgcatgtatgcaggcccctgttccctggactttttaagcatggcgggccatattgaggatttggcctccaattccacgatggtatcctgtaatatgagaaaaattattgataatctgtattacatggcggccatagagctgatgcacgcggcccaggcggttgatttgagaaaaccaacgtctctgggttttgggacaggaaaactgtttgaggcctaccgcagggtagttccttttcttgaggaggacagggatctgtcctgcgatatagaaaagacgtatgaattcttaaagggatataatacatcaaagatataaggaggaaaaagaagtgagtggagagggtaataaaaaggatgaggttcgttggggagtatttttgccggcatttttgataattggaggagggctcttctgggaatccttaaaaatgactggctgaccaaaatgtgttcggcaatctttgggtggtctttgaaatcatttggctggctgtaccagctcgtcgccatattttgtcttgtcgtcgtaataattatcacattttctaaaatcggaaatgtcaggtttggaggaaagaatgcgaagtccaagcattccttcggctcctggtttgccatgacgctgaccggcggaatcgctaccggctgtatcgtttacggcgccaatgaggttatgatttactatggcaatatttacggtgaactgtctcagacgggctggcgcctctgtctcaggaagcggcttatttcggtatgggcagggttttctataactggacgttcatcccgtatgcgatgtattcaatcgtcggatgcgccatggcctatatctattttaataaaaaagaagaactgtcggtggctgcttcccttaccccgcttttcggccagaaaatcaaatacgggttctggcgcaatgtcatagatgtagtttccatagtcgctctggcgctcgggctctcaagcaacctgggcatgggactcgccctgattggttccggcctggaggccgcatacgggattgcccagggaccgatagtctggttcactttgtttgccattattacggcaacctttacgattgcatccgtagcaggtcttgataaaggaatcaaatggctggctaacggaactacaaagatattttatgctcttttattcttcctggttattgcaggaccgactgtttatatctgcaatatgctgaacgtcggactggctacatggggagagcatttccttcgctggggctttgacccctatataatggacggcgaggccctcgttacctggtggaccatgtttgactgggcctgctggattgcctatgcgcctttgatggctattttctttgctatgatatcctatggcagaacgattcgtcagttcatgattgtaaactggattttaccatcctccttcggcctcgtatggttctccgtatggagcggtactgcgctcaactggcagcagatcggaaaagcggatctgatcggagcgattcagaatggcatagcggtatcgggactctgggagctgcttaaaaagatgcctctcagcgttatcatcataccgcttgtcatgataactatgattgccgctttctcaacaaccgcggacaccatgtccacgacaatttcccaggtgtgtacaaagggctcgcgctatgacagggagccggccaactggcagaaggttctttggggagtatcgattggaatcatcgcagttatcatggttattttcggcggcggccagcagggagtagaaggtgtcaaatacctgtcgggtgtgggggattctgtgtacttcctgtatttatcctgcaattggcagcgaccttcaaagtgttctttattgataagattattgaagaggtagaagaggacgaaataacggttcagcctgaaatgatggcagagctcacagaagcccaggcaaacgcataggaggaaaagaatgaggaaagagaccgaaaagctggaaatggatcttgtaaaaatatttctgtcaccgcctgatacgatgcgggagaagataacgctgtttattatgatggtggtagtctttatcatgtttttcgggccgctcatgttcacggaggtatccccggtaaagggagctgttctctcggcaatcccggcattcaccgtgtcatggggatggctggtgctgcttcgcagttttttccgcaaaaaagaattttctgtaaaacgctgattatacaaacttatatgagacaggggagctacagctcccctgtctcataggctccgggaatatttttaagtaatgcggcggcctcacgcctgtattcatccggcgcctgctttaatatagaagaaaattcatccggccagcgatgcgtcagttcgctgcaagcaagggctaaaagccccagggactgcggggagttcaaaaggcgggcgctttccccggcctcggcaatcagttctctggaagcggaaaaattgcctttctccgcttccaggatgctcacgtagcctttggtgatggagcgtccgatcagggcggcggaatcattgaaaagtctgttggaaagatagaatgcgtctgcgctttcttctttccgtcccattgcaaggtaagcgcgtcccagattggaatagaagacggcatttccgcaggcatgggcggcttcgcaggtctggacggccttttggtagaaacggacggctcttgcaaattgctgttgcttgcggtaggcttctcccatataattgtagcatccggcgatattcagggtataaatacgcgatttcagaggatattttgagaaaatcctcagagcccgtttcagatagcgcaggccggcagcataatttccttccatggttttaaaaaggccgtagagacggcagtctattgcataatcttcttcaaatcccccttcttttccgagcgtcaaacattccgacagggaatgatccaaatcttttgtactccatatgttaagccggtaaaaattgacgaggcgcaggcagcggatccgcataagaggatcgcgatcggtctggctgttaatcagcagcgcctttttctggcaggcaagaccttctttatattcaccccgggcgatgcagtactgggcttttgtgcgcagcagcagtgcgtacagccgggaaaaagggatggaggaagcttcgttttcaggcagggataggagacggtcttccaagatattgcagtatcccgtaaacgaagggatggctccgttattttccctgtggggagcatattgcatcggataaagctcataattctttatcatatattcttccagagcaaggatacggcattttagctccatcgcctggctgccggcgcggcaatagtggtaaatcaggcattcataatcggatgctccaagcgcctccatatgttttaaatgctctgcaagaattctgtgataataacagcgtcttgatggggacattcgttcatatatcattctcctggtgctgttattgcaaaatacaaaatagggactttgctgttcgaacctttcctcaatgatgccgaggtttttcagctgctccagagtatccaggatgttcagcggattttccctgagcagatcttcaaacagtccgaagcttgctttggactgacaggcggagagcagttccagtacggatgtcccggtatgtgacaggctctctgccggacccgaaagctggcagaaataatcagctttcattgcttttacggcggtgccggattcaacagatgcaggaggcgatatctccagatgggatagtaaattttcctcacagagcggtttcaggatcttattcatattactgcagaaaggaagaacggttccgaaaaacaggatattcggattccggccgcgtatcagcattgaaataaaatcaaggctggctgagtccatatattgaaggttatcaaaagaaagtaccaggggaatctgttcccctatactgtaaaacagtttaaacagcagactgtaggcccatgtgtcaatcgagccggtcaggggaaaaagcctggatgcggcttccaggtgactgggatccaccttgaggtgataacgctccagcaggggctggagctgcagaatcatggtgctgacgggttttaacagcacatccttttctgtttccagacaggatgcctgcaaaataagaaaagaggaattggaaagattccgggtgaaatactcagccaaatatgtcttgccgcttccgtcaataccggaaagcaggatggaggtggattctccgcccatgaaacgctgaaatgcgtccgacagaaaaagcagctctttttcgcgtcccggaagctcttcgaccgcttcctgcaggacgggccgctccgcgttcagggcatcgagcatccggtggtgcagcttttgaagctctttaccgggagatgcggaaagttccttttcaaaaagatgtaccatgcgatcgtatagcttaagccccttgtaataaagtccgcaggctctgtagcgttccatcatcagccggtagatattctcgtccaaagggtcttcttccatatacagccggaacagccgttccgattcttcgacatcgctgtccggaagaagggaaagccggcggtaaatcagcttcagataagtatgcagggcatagtgcctttttgcaagcatccattcttcgaaagcaggagcgcttttaatatagaagcttgtcaggaattcaccgtgatagacatcggtacattcctcttgtattaactgatcataatccagggtaatggagatatcaggattcaaaatcaattcctggcggccgtacggcaggatgcattcttcaccgagggccttttttaccgtgaagattgcatggcgcagattctttctggctgccgcctcgtcacactgctcccacagaagggacgcggcctgttctctggtggcccttttttctatggccagataatataaaagcgcttcggccttctggtagggaagacggcatggggaagaatcatgtatgattttaggggactgcaaaagaaaaatttcgatggaagccaatagaattctcctttgtatcttttttattattttataacagctcagggtgaaatgcaagaaacataacgccgggagccacatggggaacggtgcggcagcagatatacttgcagcggtttttagagatattgaaggctttttatgcaggtttttgtaaaaaaacacacaatcaagcgatcttttctcctccttactatagtaaaagctggaaaagtggtatataatactaactgcaaaaagatgtgaaaaagcagcagaaatatcacgatggataaatttatcatagaggaggaacaccatgcttaaactggagaatatttcttatgagatccaggaagaaaagggacaaaaaggaataatccaccatgtcgatttatcgataaatgacaatgaatttgtagtaataacagggccgaacgggggcgggaagtcaacgcttgccaagctgattgcaggcattattaatccgaccgggggccggatcctgtttaacggcgaggatatcacaggtaaaagcattaccgagagagccaacatgggaatcagcttcgcgtttcagcagccggtgcggtttaaaggtgttcaggttctcgatttgatccggcttgcggcaaaagaaaacatgtctgcggcggatgcctgccgctatctgtcggaggttggcttatgtgcaaaggattatattaaccgtgaagtaaatgcaagtctttccggcggcgagctgaaacgaatcgaaatagccacggttttggccagggcgtccaggctgtcggtatttgatgagccggaggcggggattgatctctggagcttccagaacctgattcaggtttttgagcgaatgagggcaaagacgaacggatctatcatgattatctcccatcaggaacggattctcaatattgcggaccgtattgtcgtaattgctgacgggcgcgtgattaaggaaggcagaaaggacgatattcttccggagattctgggacgtcatctgcagtggaggcttgcgatttttacaggagggataattaatggatcagattcagagaacattactggaagaggtggccgatctgcatggagtaccggcaggagcatataatatccgcgccaacggacagatggccggcagaaatacgacggccaatattgacattataacgaaagaggacaagtcgggcatagatatcagaattaaggaaggcacgaagaatgagagtgtccatatcccggttgtcttaagccagagcggcatgacggagatggtatacaatgatttttatatcggagataatgcagatgtgacgattattgcaggctgcggcattcataacggcggagacgccgcatctgagcatgacggaatccaccgcttttttatcggaaggaatgccagggtccgttatgttgagaagcattacggcgaaggggacggaaaaggaaagcggattttaaatccgacgacggaagttacgatggaggaaggaagcagcctggagatggagacggtccagattaagggagtggattccacgatcaggaaaacagtggcggatctggcagcaggagccggcattgtcatcaaagaacgccttctgacccatgggaaccaggatgccgagagcagcattattgtcaatctgaacggtgaggatgccagcgccaatgtaatgtcgcgttctgttgccaaggaagattcccgccagaagtttatttccgtcattaatggaaacagccgctgcgcaggccatacggagtgcgacgcgattattataggcaacgcaaaaatccaggcagttccggaactgaccgccaatgatccggatgcagccctgattcacgaagcggcaatcggcaaaattgcgggagaacagattataaagctgatgacgctggggcttacggaagctgaggcagaggaacagattataaacggtttcctgaaatagcaggcatattctcaccgctgtccgcatatacttaggtgtaatatgagaaaacggatgtgcgtatggccgatcaaaaagcagaaaatcttttgaacctggctctcgatgccacggcggaagaacttgaaaaatcacctgcgctgagcgtggggtttaacagggaagaaaaacggtgggagctgatcgtaaaatacaacggagatctgaatgttgtccttgaagcattaccggaaatcgaagcagccacattatctggaggctatgcgatcttaacggtaccgcaatcactaatagagtctttgacaggtttttcgcagatcgaatatatagaaaaaccgaaaaggctctatttttccgtttacagaggtagaagcaattcctgcattaatcaggttcaggaggacggaagcggcctgaccggccgaggcgtcatcaccgccattattgattccgggattgactactatcaccgggattttcgtgatgctgccggaaaaagccgcatcctggaattatgggatcaggataaagataccatatatgaccgtgaacagatcaatgaagcgcttgcagcgggaagccgtgaggcggcttaccagattgtgccgacgagggatgtgagcggtcatgggacggcggtggccgggattgcggccggtagcggactggaaggtgacggcagatacaaaggcgtggcctgggaaagtgatttgcttattgtgaaactgggcgttccggccacggattcttttccgcggactacggagatgatgcgtgccctggattatgttgtgaaccgggcggttttttaccagaaaccgctggctgtcaatctcagcttcggtaatacatatggctctcacgatggaaccagcctgctggaaacttatttaaataccatggctgcccaggggaaaaccacagtggttgccggaaccggcaacgaaggcagcgcgatggggcatacctccggtgttctgacggagggaagcgaggtggagattgaactgtcggtggatggctacgaaaccggcttcggcgtacagctgtggaagatttatgcggatatttttgatgtcgtactggtgggacccggaggcactacggtaggtccaataagcagccagctcggctcccagcggatccagtttgcaaggacaacggttcttttatactatggaaaacccagcccttacagcaaggctcaggaaatttattttgatttcatacccaggtacgattatgtggagagcggaatctggaaattcaggctgattccccgccgaattatctcggggcagtatgatttctggctgccgtcggcaagcgccctgaaccgtgccacccatttcctgcgctccacgccggatacgaccctcacaataccgtcgacatcccttcgggcaatctcagtcggagcctataacgattcttatcaggcctacgctgacttttcagggcgggggtttaccaggctcgacaacctggtcaaaccggatcttgcagctccgggtgtaaatgttatgactgccagggcggggggaggctatgagacggttacgggaacatcctttgccgccccctttgtgacaggcagcgcggctctgatgatgcagtggggagttgtaaggggcaatgatcccttcctctatggcgaaaaactgaaggcttttttgatccggggggcgaggcacctgccgggagagagcgtctatccgaacccgagaatcgggtggggaaccctgtgtctggcagattccttccctgtgtaaagcataataatagaaaggaatcttgcgtcttttgtcctttttttcgtaactttttagaaaatattaacatattaagggtgttaaaaagtagaaaaatatgatatcatagatagataatgggtgaactttcgagattattgcacaaattgttctgaataagggtgggagcgatatgaatatcagagaaactacggaaaaatgggaacgtgaatatcttagcccttacgcatctttaagcgaaaacaccaggggcagggacagggaagaacctctctgtgatatccgtccggagtaccagcgggacagggaccggattttacatagcaagtcattcagaaggctgaagcacaagacacaggtattcctcgcgcctgagggtgatcattacagaacccggcttacccatacgctggaggtttcccagatagccaggaccattgcaaaagctctgcggctgaatgaatcccttaccgaggcgattgcgcttggccatgatcttgggcatacgccatttggccattcggggaagcgattctcgataaactttgcagcggcggctttgcccactacaagcagagcgtccgcgttgtggaggtgctggagaaaaagggcaggggaatcaacctgacctgggaggtgagggacgggatattgaatcaccgtaccagcggccgtccatctacattggagggacatatcgtccgtctttccgataagatagcctatattaaccatgatattgacgacgcgatccggggaaagattttcgaggaagaagatctgccgccggaatatacggatattctcgggaacagtgtcagggagcgtctcaatacaatgatacatgatattatttaccagagctttgacaagcctgagatcgccatgtctcccggtatggagacggcgatgcacggcctgcgcagatggatgttcgagaatgtataccggaacggaatcgccaaagcggaggagggcaaggcgcagcacatgattgtcatgctctatgagcattatatgaaacatattgatgaattaccggaagagtatctggatatgatgagagagcgcggtgaaaaagaagaacgggtggtctgcgattatattgccggaatgaccgacatctacgccatagaccgttttaacgagctctttgtaccaaaatcctggaaagtttaaggaggttttcatgtattatccggaagaagtaatagaagaagtcagaatgagaagcgacatcgtggatgttatttccgggtatgtgaagcttcagaagaaaggggccaattattttggcctttgtcccttccatcacgaaaaatcaccgtcattttccgtggcgccccagaagcagatgtatcattgctttggatgcggcgtgagcggcaatgtgattacctttgttatggaatatgagaattattccttccgtgaggcagtggaaatgcttgccggacgctgcggcgtcaagctgccgaagatggaatattccaaagaggcaaaggcgcaggcggatctgaaagcggcgctgcttgagatcaataagcaggcggccaattacttttattatcagttgaaacagccgcagggccgggcaggctatgattatctgcagaggcgccagctgacggatgagacaatccgccggttcggactggggtattcgaataaaacaagcgatgatttgtaccgctatctgagaggcaaagggtatgacgataccatattaaaggagacaggccttgtcacaattgaagagcgcggctcacgggacaagttctggaaccgcgtcatgtttccgattatggatgtcaataaccgggtgatcggttttggcggccgcgtcatgggagacggagaacccaaatacctgaattctccggagacgaagctgtttgacaagagcaggaacctttatgggcttaattatgccagaacctccagacagaagtttatcctgctctgcgagggatacatggatgtaatatcgatgcatcaggccggctttaccaatgcggtggcatcgctggggacggcgatgacggaacagcatgcggctcttttgaaacgctatacggaacaggtgattctgacctatgacagcgataacgcaggcgtaaaagcggctcttcgggcaatcccgatacttaagaacgcggggatatcggcaaaggtgctgaatatgaggccatacaaggatccggatgagtttatgaagaacctgggtccggaggagttcaaaaaacggattgaaaatgcccgtaacagctttttatttgagatagatgtattaaaagaaggatgcgatatgcaggatccggagcagaaaacggatttttataataaggcagccagaaaattactggattttccggaagctctggagagggacaactatatacaggccgtatccagagaattttttatcaattatgagaatttgaaaacccttgtcaatcagttgggaaaccgtttgggaatggggccggaagaaccagggagccaggcggggaagagagcgccgcgaaccgtccgggcgcgcctgcaaagaagaaggagaaggaagaaggcatcaggaagtcggagcgtcttctgctcacatggctgattgaagaaccggagctttttgataagattcatggaattatcggtccggctgattttgtaaaaccgctgtaccgggaggcggcgcagatggtttttgacggtcatgaaaaaggagatgttaatccggcatccatcctgaatcattttattgacgacgaggggaactaccgggaggtggcggctctgtttaacgccagtctggaagagtccctgagtaatgaagaacagaaaaaagccttttcggagacagtgctgcgcattaaaaagaacagtctggatcatcagatccgccacgccgaagggctggacgagctgcaaaaactgatcagggatcaggcggaacttgctaatctgcatatttcactcgattaaggagaaaatattaaaaagctatggagggatgtaagaattatggatgaaaagacagtgacatttgaagagaagctcacacagcttttggaactggcgaaaagtaagaagaatgtgttggaaaataaagaaattcttgactttttccatggcgaaatactgaacccggatcagttggatcagatatatgattttctcgatagtaataaggtggatgtattgcagttcgaagaggagcttgagatcgatccggatctttttattgaggaagagctgaatgatgaagaagagatagacgttgaaagcatcgatttgactattccggacggcgtcaatatagatgaccctgtgagaatgtacctgaaggagattggaaaggtaccccttctctcaccggaggaggagatagaattggcaaaacagatggagatgggcaatgaatatgccaaaaagcgtctggctgaggcgaatctgcgcctggttgtaagcattgccaagagatatgtgggccgcggaatgcagtttctggatctgattcaggaaggaaatctggggcttattaaagccgttgagaaatacgactattccaagggctttaagttcagtacgtatgcaacctggtggatccgccaggctattacgcgatccattgccgatcaggcccggacgatccggattccggtgcatatggttgagacgattaaccgcctgatccgcacctccaggcagcttctccaggagctggggcgcgagccgcatccggaggaagtggcggagcggatggatatgccggtggagcgcgtcagggagataatgaaaatctcgcaggatcctgtttctcttgagactccgattggggaggaagaggacagccacctcggagattttatccaggatgatcatgtgcaggtgcccctggatgcggccacgtttactctgctgcatgagcagcttatggaagtgcttgacacgctgacggacagggaacagaaggtactccggctgagattcggcctggatgacggaaggccgaggactctggaagaggtgggaaaggaatttaacgtgacaagggagcgtatccgccagatagaggcaaaagcgctcagaaagctgcgtcacccaagcagaagcaagaagctgaaggattacctggattaatgaggcaacagttcggccatgattacagtccggcttttggatgaaccgccatacaagaaataagaatttaactgaggaaatttagatgaaattatcacaccgtttagagacaattgcttcctttgttcgcaggggaagcataattgctgatataggaaccgatcatggatacataccgatttatcttgtgaaggaaggaatttcccccgcgcgctggccatggatgtgcggaaagggcctttggagcgcgcaaagcggcatgtccatgaatacggtctggaagacaggatatgcctgaggcagagcgacggcctgcataagcttgaggcgggagaggcagacacgattgtaatagccggaatgggcggagagctgatggtgcgtattctggaggaagggaggcatgtttttgaaagtacagaacgcctaatcctttcccctcagtcggagcctgggaatgtgaggcgttttctcgaaacaaacggcttttgcatcctgagggaaacaatggtcagggacgaagggaaatactacacagtgatagaggcaggccatgggatgatgaagtacggcagagactgcttttatgagtacggacgctgcctgattgaagagaagaacggcgtgtttgccgggtatctggaaaaagagaaaaaaacagtggaagagctgattgaaaagctgtcgcagaatcattcagagagcgcccgtaggcgtcttatggaactgaaggagaggcagaaaattataaaggaggcacaagatgaaatgcagggaactgattgaaatcctggaagaactggcgccggtttctcttgcctgtgactgggataacccgggccttctggccggcaggagtgacaaagaggtgagaaccgtgtatctggctctggatgccaccgatgatgtgattgacaatgcggtggaatgccgggcggatatgattatcactcaccatccccttatctttaaaccattaaaaaaggtcaatgatgaagatttcatcagccggcgtattcttaaaatgattcagaacgacatatcttattatgcaatgcatacaaattttgacgcggcgcccggatgtatggctgacctggccggcgagcggctggggcttaaggataccagggtgttagaactgatggggaagacggcggaggataaagattacggcattggaatttacgggttttttggccgcagcatgacgctcagggagacggcagaagccgtcaagaaggcctacggcattccgtttgtaacggtgttcggaaatatggaggggagcataaggacggcggctatctgtcctggagcaggcggcagcacgctgaaggaggctctgagatgcggcgcggatgtgtatatcaccggagatatcggccatcatgaggggatcgatgccgtggccaacgatatggcggtgatagatgccggacattacggtatcgagcatattttcactgattttatggaaaaatttctggaggagagactgggagagcggcttaaggttatgaaggaacgtgatacatttccaaactgtgtcgtttgagtaacaggcttgtctgattaaaaagaaggagggctaatatgccgattgtaacaattggggctgagaaaagggagtacgcatttggaacgccgtttcaggagattgtaaaagattatcaggaaggcatagagaatgatatactgctcgtctcggccgacggaaaactgaaggagcttcataagactttgaaggaagactgtgaactgaggctgattaccgcggccgacagggctggctttttaagctaccagagaagcgcgcttttcctgatgctgaaggcattttatgatattgcaggcaaagataacgtcagcaaactgacggtgtgtttttccatgggaaacggtctgtatattgaaccggagggagcgcttgcgctgacccgggaactgcttgacagggtgaaaacggagatgattcgcctcgtgtctctcgacctgccgattttaaagcgcagtgaaaacacagatgaagcggtggaactgttccatctgcacgggatgtacgataaggagaagctgttctactaccggcgcgcttccagggtcaacatttacagcattgaaaatttcgaagattatttttacggatatatggtgaaaagtacgggctatatcaagtattttgacctgcagctttatgatgacgggtttgtcctgctcttaccttcgagaaagaatccgaaggagctgtctgcattgaatccgagaaggaaactgtttgaggttcagaaggaatcggaacagtggggcaaaaaactgggtgtttttaatgtgggaacactcaatgaggccatttcccagggcagaatgaatgaactgattctgatgcaggaagcgctgcaggagaaaaaaatcggtgatatggcggaaaagattgccggctccgataagagtaaatttgttatgatagccggaccgtcttcttcgggaaagactacattttcccaccgtctctccattcaattgagtgcgcttgggttaaaaccgcatccgattgcagtggatgactactttgtcaaccgggtgaacagcccgagggatgaggaggggaattacgattatgaggcgttggaatgtattgacacaaagcagtttaatgaggatatgacggctctgcttgccgggaagagggtacagcttccaagatacaattttgtaagcggtgagagagaatataagggagattacctgcagctgggagaggaggatatccttgtcattgaaggaatccactgtctcaacgataagctttcctattcgctgccgaaggagagcaaattcaaaatctacatcagcgccctgacccagctgaatattgatgagcataaccggattcctacaacagacggaaggctgatcaggaggatgataagagactcaaggacgagaggctcctctgcgcaggatacgatcaggatgtgggattcagtcagaagaggggaagagcggaatatcttcccgttccaggaagaagccgatgtgatgtttaattcggcactgctgtatgaactggcgatactcaagcagtatgcggaaccgattctctacagtgttcccagggactccgaggaatatccggaggcaaagcgcctgttgaaattcctcgattatttcctgggcgtaagcagcgagagaatcccgcagaactccattcttcgggagtttgtcggaggaagctgtttccgggtctagagcgtgttccgctcatattaaacacggtttggttaaacatgaacgtgacaagacaccaggcacagttatcagcgcctgtcggcgagatcggcaagagctccgaacagaggggttgccaggccgaaaccgccgctgatggtgagaagctgtcctgttgtgaaggatgattcatcggcggcaaaatagacaacggctgcggcgatttcttctggttttgccatcctctggatgggggactgctttaaaaatgaatcgcaaaagaagccggataatgcatcccggacggcatcggtctgagtcatcccaggcaggatggcattacagcggatgccgtttctggcttcctggactgcgatcagttcggtcagatggttaatcgcacttttagccgtgccgtaggcaacctgggaaatatcagggattaagccgctgatggaagagatgttgataatactgccgcctccgttttgcctcatgcagggaatgacggcctgcgaggcggcataagtgttgccaagatttatggttacggtattcaggaaggtttcaacggaggtttttgcgatatccagatccatggccggatcggaagaaccgaagttattaacgaggacgtcgatccggccttcggcttttgtgacctcatctgccatagaacggcaggtttccaactgttcggcatcataatggacatagtggatatgctggtttccggtttcgtttttcagctctttgatccgcgtctctgcccgttccctgtttctggcggccatgtatacgatggcgccttcttttgcgcaggcagcgacagcggcaagaccgattccgcgggtggaagcggtgacaaggattactttcttattcagtctcacggcagctcctttactaagatgtttttaataggttgaatttcatatcttattatgtgccggagaaggaattttatgtttaggcgcttttaaacagactttccctgacgtaaatccggtaggggaacaggaggaaacgatattgaagaaaactaaaacagatgccgctgaaaaaaggcagttgattatatttttgtccgttgcatttgcacttccctatatgatggggattttaatggggtatgcttattacagaggaatagacgtgagctgtttccccaatgcccaaatgtattatccggcagcaggtgtcatgctggctgcgctgctggtaaagaaagaggacaagctggttccgaagaaattctatctctgcttcatcacgattaccgtgctgttactgctgcttacggttggcagcgtgtttctgcccgcgacggggatgctgtttgcaggcctcaatatgattatcacctttggctctctggtctcgtggatttttcttcttgcagagaagaaggaaaatcgggaagcatatggattaagagcacataatggaaaaatttctgtgcttatggttatattgttcttactgctgtatttcgggcgtatattcctgatgtatattgcaggcggacaattggatgaattcatagatgtatttaaaagtccggtgacttatagaatactatttgtattgccaatcaattttttccttgtattcacagcatttttcggtgaagaatatggatggagatattactttacaccgtttctgcagcaacatttcggcaaggtaaagggcgtcctcctgcttggaattttgtggggactttggcacctgcctgtcaatgtgttttattacagcccgcatacctggctgcaaagtattatttcccagcagatcacctgcatcggtatgggaattttctttacgtatacctacttaaaaaccaataatatctgggttccggtgattctgcattttctgaataataacctggtggttattttgaacagtggaaatgcaggcgcaattaataatcagcttatcagctgggcggatgtcctgctgcttctcatcctcaatctggtattattcgtgccttttattttaacgaaggagtttaggggagcggataaatatacgggaaagaccgcagactaacggatctaagatacgacaatgcagagcattgctttgaacgttaaatgttttgagcaagacgataagccgggttatgtcgttgaatggccatctatctagctttgccgtcgccggcaaaatcaagcgacctacccggaggcagacgggccgccttatgcctcctgttcggtcttgcttcggatggggtttacatgtgccctgtctgttaccagccaggcggtagtctcttacactgcccttccacccttaccgacaggcacaaagtgcctgtccggcggtatatttctgttgcactgtccttggagtcgcctccaccagacgttatctggcatcctgccctgtgaagcccggactttcctcacctgcagcctttcggtcctgcagccgcggccatttgtcttactcaaaacgttacaagtttatcatattttcttatatttgtccagttattctcagacagcatccgcccggctatatttacaaataatatttctccggacagccgtatcggataacaggagcaaagtctgaattattttgaatatttttcttcacagtactgacatctgtaagtttcttttttctcgtcggcgagatagaaaatatgcggcagctcctgctcgatggaggtgatgcagcggggatttttgcagtagatgacgtttgtgattttctttggcattttcacccgttttttctctacgatatggccgtccttgatgatattgatcgtgatgttgtgatcgatgtatcccaggatatccagatttaccaggtcaaggccgccgtcgatcttgattatatcttttttgcccatcttgctgctcttggcattcttaatgattgcagtctggcactcaagctgttccagtcccagtttataatagatatccatacttttgcctgcctggatatgatccagtacaatgccctcggttaagccgctgatatttaacatggtttttccacctccagtaatgtcatgattaatgccattctcacatagacgccgtactgcacctgcttaaaatatgcggcgcgcgggtcttcgtccacctccacggcgatttcattgactcttggaagagggtggagaacgaacatatcctccttcgctagggccatcttctttttgtcaaggatgtagcagtccttcatccggatataatcttcctcattgaaaaagcgttccttctggaccctggtcatatagaggatgtccaaatcaggcattgcatcatccaggttttcgacttccctgtattcaatatggttggattccagcacatcctcacggatatattccggaacgcgcagctccggggggaaatcagtacaaaacggatacctgtatagcgtaccagcgcattaattagggagtggacggtgcgtccaaactttaaatcgccgcagagtccgaccgtcagattgtcaattcggcccttcagggagcggatcgtcattaaatcggtgagagtctgggtgggatgctggtggccgccgtcgccggcattgataactggaatagaagatttggtagaagctaccatcggtgcgccttcttttgggtgacgcatggcacatatatctgcaaaacaggaaataacacgaattgtatcagaaacactttcgccctttgcagcagagctggaatcggcagaggcaaaacctaaaacgctgccgcccagatttaacattgcagcttcaaagcttaaacgtgttctggtacttggctcgtaaaacagggttgcaattttcttgccgtcacatacgtgggcatatctgtcaggattcttctcaatatctgaagcgagatcaagaagctgttcaatttccccgacagaaaaatctaagggatttaacaaatgtctcatttggttctcctttgttgtgctttttgaaaagtattatatagcattttccggcagatttccataggttttgtaaaaaaagtgagggaaaggtttgggttagttactattcacagccaaggtcatgatgttggggtcaaaaggtcttttgacccctttgataccggattgctccgcactgcgtgctctcacaatcctcaaaaacattcgcaatccgctcatttttctgcgaaaaatggcttcttactcatgtttttggcgggtcccaagattaaaaatcttaatgcaagcaagcttgcatcagatttccaaccttttgaccctggtatcatgtcatttggttaacagtgcaatagatttaactgaggcccggaggacgcgtccggaacggaccatgtccggtgtggtgaggcggctgtctgagtgttccgtccccgtgggagtttgtcgtggagggggaatccggccggaatgaattgctgcggggaccgtttgcactctttggagtgcgcatcagtgctaagctcgtgagggacctcgctaagcaccggcggactcccatgtcccctccgcaattgatatgccggcacgggaaaaacgaaagcagtttttacggatgaagatactgaggaggaaattttagatacggctttggcggatgatacaacagttacaatatcaccggtacgaacgaatagcatttcagaaattatgacggaagcaattaccggatagaactaaacattaaggtaaagaaagactgatatggaaaggagattccaaggcctcagaacgtccttccggagaggacgttcttctgccataacggattaaactctatgcggccaatctttaaatttccatctgctcactttccgtcaggaacgagaggcagtccataattcctgccatataggccagcacattattatttgtgtcgatttcttcccttactgccagcagctcgtcaacggcccggcgctcctcctgggtcagttctaattcgctgaatttccgttcggcttcctgcagcttatcccaatggttactgcagcttcgatccattttataaaattctgcaatcgtatcaccggacattctgtctgccagtctctttaaaattttccagtattcttttttcatcattgatgtctcctttaagtatgaattatgttatctgttgtctgttgtctgttatctgcagtctgcacggcctgaggcggtccccggcatcccgtgctccttccggttttccggccgtatctctgagatgtacatttctccgccggtcttgacggacgaaagttttccatggcataagctccttctactgttgataaaaatatggtatatggaataaaatcacctcggcccgcccggatacggctcatataaatgaagcgtagatatcagtatcaggacggttttccctgtaagaaaagtttaaggaactttaagaaaaatagggtgggacaaaatcggtctattatgtataataagatagaacaaccattctagcagtccgtaagactgaaatccacaattaatagtcaggactgtcggctgcagaacaatacgggaggaacagacttggaagaaatcggcaaagaacagataaaagagaggattcccgccatacaggtgagaaatttatataaagtataccgtgtcggagagacaaaggtatacgccttaaatggtgtggattttacaatgtataaaggtgaattctgtgccatcgtcggtacctccggttccgggaaatccacacttttaaatatgcttgcgggccttgagaagccgacaaagggggaaattgtcattgccgggaaacatattgaaaagctgaatgagaaccagctggtttctttcagaagggaaagggtcggcttcatctttcagtcctataacctgctgaacacaatgaatgcggtggagaatatagcgctgcccctgtcgttccagggaattcccaagaagaaacggatagacagggcccaaaaatatctggaattagtgggccttgaaaaggtcggcaggcatatgcccaaccagatgtcaggaggacagcagcagcgtgtgggaattgccagggcgctggtggttcatcctcagattatctttgccgacgagccgaccggaaacctggattccaggacaacgatggaggttctgaaactgatgcagaagattgtgcgggaacataaccagacgcttgtcatggtcacccatgacaaccatctcgctacatatgcggacaggatatttcatattatcgacggaaagatcgtaaagatagaagagaatcaccagcgagccggtgaggagacagaagacagggagggtgctcaggatgaataaatggaaaagactgccggttattgcattgcttgtaatgctgctggcgataacgggaaccagaacggtaacagccgagatgctggatatgaatgagtttaatgatgatatgattaccgttaacaaggtgccgagaggaaaagcgggaagcaagatttcgattaagatgacaatccataacaccggcacaaagggtgataacaacatagagaaaatcaggctggccaattcttatgaatatgagcggattatggagcggcagtttggagaggctgacgacggcgaagacggcgatctccgctggtacgataagtccttcccgtttgaggcagattcttcaaccttcaaggagaaggatgtcaacgtaaaacccggctcttccaaatcggtcacattgagctataaattaaggcgggatctggcggccggatactatcaggcattctttattattgacggaggcacggaggtcggagttaatatctgggtttccgcctatgacggctccaccgaagaggatgaaaatacgaaaatcgagtacgatttttcgattggagacggtcagtttaccccttttgccgcttataaccaggtgatgaattttggcgtcaacctgacgaatacgggattaaaaaaggtctacgacgtgcgggtggagatgcagctcgatgccgatgtgacaaagttcccctttaatattaacgaaggaaattacagccggaagatgggggatatggagccgggacagatggttacggttccctacagtatggcggtacgggaggacgtaaagtcgggattcttcccgattcattatctggtatcctaccgggaagaggaaaacggtgatttttcagaaccggttgaccttatattttatgtccgcgtcaaaggagaagacgatgataaactttcgtccgatgcgggtgaagaggacagaacaaaggccagaatcatagttgacagcttttctacggtgcctgaagaagtgttcgcaggccagccgtttgaacttcgagtcagaatgaagaatgcctcgtctaatgtaacctccagcaatatcatgtttacctttgcctcggaggaagtggagagcagtcctgtctttacttcagattccggttcgacttccatggtagtcaatcagctggcgcccggcgcaacaacggatctggtaatggtatttaaatcatcaccgacagcggagcagaagtcttacacgatgacaatcaaagaacagtatgacagcccggaatttaagaatgcaaaggaagaagtgaagatatcaataccggtaaaacaggttccgagactgaatacgggaacgattgaagtcatgccggacagtattaatgttggttctgagaccaatgttatgtttggtatcaataataccggaaaggtccttttatataacgttatggtgcgttttgaggccgattccattcagacgacagatgcttatgtcggcaatattaaaccgggtgagaccggaaatctggacacgatggtctccggcgtggctccgaccacagatgaaggcaaagtgaaaattattatttcatatgaagatgaaaatggattgacaacagaggtggagaaagagatgatccttttcgtcaatgagccgatggacgacctcggaggaatggaggccggaaacatggacgttgacggaatgggaggagccggcggcatggatgggatgaacggggaacagacctttttcagccggtataagaaggtgatttttccggtagccgcgctttgcattatcataataggaacaaccgtaatcgttatcaggaaaaagaagaaggcagcgcaggaagaaggaatggacgatgagattctttgatcttttatcaatgagtgtcaacagtctgctgcggagaaagctcaggacgtttcttacagtcctgggagtggtgataggaactgcctccattgtggtcatgatctccctgggaatcggactgaataaattcacgatggagcagtatgaatcatccggcagcctgacggcgatacgtgtctataattacgacaggggaaacacgaatgataagacaaatccggaagatggttttatgactgatgaaaccatgaaggtttttgagcggattcctcatgtggtctccgcttacccaaagcttaacatgtttgtcattatgaagcagggtgtctatgagggaaatatccagttgatcggagttccccgggcttccatgaaggacattaagctgggacagggagagcttccttcccccgattctccggatcttgagatggtggtgggaaatatggcggcccagaatttttacaattcaaagacaggagaaggatactgggacagcggtgagatgccggacatagattttatgaacaaaccggtatttacaatattcgataccgacagctattatcagtccaaatacccgtccggcggggatggcaagactgcggcaaaaccgccgaagaaatatatgctgaaaacagccgggattgttgagggagggccggaggactggaatgaatacagttatggcatatacgttgacattgaaaagctgaaaacccagctaaaacagatcttcaagaagaagccgatacccgggcagccgacgaataaaaagggtaagccctataattactttgtctatgagcaggcaaccgtgaatgtggacgacatgaagaatgttattgaagttcagaaagcaattaataatatgggatacgaagcaaacagccagatggaatggctggagcagtcccagaagcagtccaatatggttcaggccgtgctgggcggtatcggagccgtctccctgtttgtagcggcgatcggcattgccaatacgatgatgatgtccatctacgagaggacaaaggagattggtgttattaaagtactcggatgcgcaatgggaaatatcagaagcatgttcctgatagaggccggatttatcggctttgtcggcggagttgccggtgtaatcctgagctacggcgtatcatttctgattaataaattcctggcgggagctttgctgtacggtatgtccagcaagctgtcaatgataccgccgtggcttggatttgcttccatcggttttgccatattgattggtatgctggccggattcttcccggcgctcagagccatgaaactgagtccgctggcggcaatcaggaatgattaaaaccacctagtcaactgtcgtcacatcctgtttccatctcccggtggcaatataggcgaataccaggattccgcccccgagggtggcggcagggacggcgattccaattcccaggattcccatattaagacccagcgcaagagcccaggcgacggggatacggataacaattccctgaagaacattgctgcacagagtgatcagggtatgtccggtaccggtgataaagccgttggcggaaaagacaaatgcagtcagaagatagtctgcacagaagccgcggatatacagtgtgccgtaccggattacctcgggttctccgcgggccagtatgctcataaactgcggcgtgaagctgatgcttgccaggaacaggggaataccgactatgagagaaagtccaatcccttctttcaggcaggagagggcgcgctcatattttctggcgccgatattctggcccgacatgaccgccatggctcccgacattgcggagctgggaagcatggcaatgttattgaatttaccggccagctgagcggctgcggaagccgcgtaaccatactggttgatcagagccgtcagaaacatgaaggatacggatgagatactgttctgaacggcagcgggaaagccgattttaataattaaaagaacctttgtacggctgagcctgagattcctgcgtgtcagccggaatatactgctttttctgatcagatatgctgcggaaatgacaaaactgactgcctgggatagtaccgttgcccaggcggagccgttcgggcccattttgaagccggcaacaaataaaaggtccagaaacacattaagggtccctgatatggttacaaatatcaggggccttttagaatctccggttccgttcagaaccgaacttatggcattgtattcaaatacaaaaaaatttcccagcatgcagatttgcatataactgcacgcattctcaaaggactcggcgggagttctgagcagaaccaggaaggggcgggcggcaatgtacatgacggcagtcataaagacggcggctaaggcaaacaaagtcagcaaggttccgatcgtctgctctacatcctccccgcgccgcgctccgacatattgggatattaagacggttccgccggaggcgaaaccgattatcaaaaatgtaaatgcagatacaatctcgcctccaatgccgactgccgaacttccggcagctccgttgacccactggacgatcagcatatcggcagtcatgtacagattttgaatcaggctggacaggaagaatggaaaactgaataggatcagctgccttcttacactgccttcggtaagactgtgtccaatctgcatgaggtgaaactccttttcttaagtttctggttgtacatctattatgataagtcacaaattataattcataaattatcagtgcatccggttttccggaacttgttccggtttttggctgagggtgtgcgcggcggccggcatgaatcagttcgatggagtttacggcgctatggtgtttaatctcatcggcacagtcgatctaataggggagtatctcttctgcatcgagggggaccatacggccgcgtgttttaccggcagaacagtctgacggattttctccaatggttacaataccggcgccgccttttgcgcgttctccgcagagggctatgtttgccggagtaaaatattcttccggcataagattggagacgcccatgggtgtcactgttagaccaatcatacaaaaaaagcagagtgaagtcatttcagaaaacaggcagtttattttaatatttgtgcatcggagcggaaaatgatctagcccaatgctgtaaatggtatattttttattaaaaatattgtataattataatccaggagacgaggtgggacgagatatgagaatcaaaatcgatatgaacggcaattcaccggcttatatacagatgtcggctcagattgccgcggcaatcagggcgggagaatacaggccgggcgataaactgccgtcggaagcagaattctgccatgagacgggactggccaaaggcacggtcagaaagacattcgacaagctggaagaagaaggctatatccgaagagtgcacggaagcggcacttatgttcagggctggcagccggaactgcgcaggatggtgcagtttgataatagctgcaaaaaagaaggaatgaaaccggacgaatgctaccggcttttgaaagaagcctgcggccgtttttttgccgctgatattccggatcaggcagcgatgattgactgtaccccggagatagcgggagatattacgagagaacttgtaaaaatctggaactttgatatgaaatactatcagattgacggagtacgcgccggaacatttatccctccggaggagatatggattacaacaaaaactcattttgaagagattctggctgtggctgagaaggctggaaaggcacttttgcaggtcaggctttcggttcccgctacggaagaagaggagattgccgctttggatgatgactgtctgctgggcatagtgtatgacagccaggatttcctgatgcatatcagccatacgctggctttgctgggaaggcataatacatattatctctgccagaaagaagaatggtgcgataaaaaaagagccattcggacagaggacatcatatggctggtttccgtgcaggaggaagagattatcaggcagatggagacgatgggcagccattatattgtattcaattacggggtaacgaaggattcattggatgaaatcagggcaattatggagcagagaagaaaatgacagataaaaaaccagagaagaaagaaacgcctgtttatggaaagattgtggatgacgtcagaagcaggattgagtcgggacagtggaaagagggtcagaagcttcccggagagagggaactctgcaacctgtatggtgtggcccggggaacattaaaagccgctttttccgagcttcagaaagcagggcttatcagacaggtccggggaagcggaacttatgtggaaaagcgggatgggagagggaatgctttggaaaaacaggcggatgaactggtagcttatctggcctctttaaaactttccaaggctgagatactgtctcttggaagaacgataatctacagtgatataacggcccagcacttccataagcagccgctgtgcgatgaccggaaagaacgggtttccgtgcagaatgcgcacgaaagcaccccgcggaacacaaccgtgtgaacagtaacgggaatgaaacggagaattaaaataattacaaatatatattgacaatttacaaaaaaaatagtaaactttggacaagttaccgattggtagtgaagcaatctgagatattgaaatgtgtgtggaatttcagaaagttttgctaacctttattttagtgaaagcaattctataatcaaatcagtaaggatatcggtatttcagtcattgcttccgttcctgttaacgtattaaggaaaaggagagaagcaaatgaagggaatcaaaaattttaaaagatccaacaggaaatatcttgcgctgcttatggccgcattgacggcagcagcctcattgagcgcatgttccggaagtacctcgggtgatgcgtcacaatcctcatcagcaaaaacagaaaataatggaagcggtgcagccggttctgtgcttcgtgtgggaagaacatgggactccgggagcggcaactttgatccggcaaccttctcggggatctcatttcagtttggcccggatgtgtttgaatcgcttcttacctacaacgacaagcaggaaccggctccgtatctggctgagtcatgggaaacatccgatgatttgaagacgtatacgttcaagctccgtgaaggcgttcaatttcactatggcttcggcgagatgaaagcaagcgacgtcgtattttcagtcggccgccttttggacccggccattaacaacacggcaaccaattcaacaaatctcggcctggccaatatcgaaagcgtcgaggccgccgatgattacacggttgtctttactttgaaggaaggagacgtattcttccctgataaagttgccagatcttacctaaccattaccagccagaaggcagtggaagaaatgggtctggaagagtaccagaaacgtccgatcggaaccggtccattcatgctggaagaaggcggtgttcccggagaaaaatattgtacggttaaatttgacgattactggggccagaaagcaaagctggaccgtgtggaatattatgtaattcccgacgatgtaacgcttgccaatgcgatggaagcaggcgagattgatacatatgacgtaaacaatctggaaaaagtggaagagtatatggccgatccggatacttacgttcttctcaacgcaagggattccgcgcagtcctatatcggaatcaatgcgaatttcgagccgttaaatgacccgaaggtacgagaagcgattgcattaagtattgaccgcgatatggtttgcgatgagtatttcaaaggcacggaagaaaaatccaaaggtttccttccaaccttctgccgctatgcactggaagactactggaacccggaatataatccggagaaggcaaaacagctgcttgcagaagccggatacccggatggttttgccatcgacatgtatgctcctaatgatacgctgagcgcaggaccggccacattagtgcagcagttcctgacacagataggcctgaaggtggatctccagactgtggatttcggcgtatggcttgataaggcaaaggccggagaaatcccgatttatctgttctgggattcctgtcctgttattcctgacaacgtgttaaaacagtttacaagcgagagcacaatcaactacattgcttacaatgatcctgagtacgacagaatcgtggcggcagcggtggaagaaaacgatctggcaaagaaagcggagctttacaatgaagcacagaaaaatatcatggattccggctgtctctatacgatgactacatactctattcatcaggttgtcaacccgagagtaaaggaccttaagattacgacaggacttatgcttacctgcagagaggcgtatatcgaagagtaaggttacgacggcaaagcgcgcgggcctgccgcacgcagcctgcgcgctttgcaatgcggtagttgtatagcgctggacaattaccagtacggtataaatttaaggagtagtctatgaaaaaatattttggtatgcgggttttgatggcgatacctaccattttaggcgtgttccttgcggtgtttctgatcatccggatggtgccgggtgatccggcttccgttatgctgggcaaaactgccaccccggaagagatctcactgttccgtgagcagaacggcctggatgaaccgctaatgacgcagatggtaatcgcggtaaagaaattcttcacaggcgatttgggagaatctctttcttcccataaaaaagtgacggaacttttaaaggaacgctttcccaggacgctggagctggtgttgtggggaatgatactgaactccatcctgggaattatatggggcgttgtcgccagtgtgtatcgcggcagatggcccgattacatgattagcggcatgagtaccataggtatgtcgctgccgtcattttacgtggcgattctggtgcttgtagttctggctgtgaagctgaagctgataccggttatcggcattcaaagtgaaaatgccaattactttcagaccattgtagctcctgttcttacgatggttcttgccggaagcgccctgaccatccgtacgaccaggtcaagcatgctggaagtgatgggagaggatttcatcagaaccgccagggcaaaagggctgagcgaaaaagccgttttatttaagcatggtctgagaaatgcggcgattccgattgccacgattatcggatataatctggcatccagtttcggcggttccattgtaattgagacggtgttcaacaggcccggtatcggaaagcttttgatggacgcggtgacgaagagagattatcccgtagtccagggaacggccgtattcatcgccattctgctgattgtcgtaaatctgttgacagatgtcatgtacagcattatcgatccgagaatccgtgttcagtcggacaaataaaggaaaggcagttgggacaatgagtgtaatacaggaatgtatgcaggataatgacaatatcctgcaggttgaaaatatatgtaaatactataaagccggcagcggcagattatttgataaaacagttttcaaggctgtcaatcaagtgtccttttctgtaaaacgcggagaaaccttcggtctggtgggagaatccggctgcggaaaaagcactctggcgaagctggtcatgaaactattggaagcatcgggcggcagggttttgtttgacgggcaggatattacaaaaatgccgaagaggcagctggatgcgatcagaaaggatatgcagatagtatttcaggatccttatgattccctgaatccccgctttaatttaaaacagatcgtgtccgaaccgatggaaaatttcggatacagcagacaggaaatcgatgcgcgcgttaaagagctgtttcaggaagtcggcctgccggagaagctgatggtgcgctatccccaccagttatcgggagggcagagacagagactctgtattgccagaagcctggccctttcaccgaagctgttgctctgcgatgaggtggtgtcggctctggatgtatccatacaggctcagatactgaaccttctgctggatttaaaggataaaaacggcctcacctatgtttttatttcccataacctggcagtcgtcaaatttgtttcggataaaatcggagtcatgtatttcggaaagctggtagaggtagcgggaaaggacgagctgtttgaaaactgcctccatccctatagctgcgccctgctctcggcagttcccatccccgatcccgacgtgaagacgaaacgtctgatattggaaggcgatcttcccaatcttatgaatccgccgaagggatgtatcttccaggacagatgcccgtttgtaaaggatatctgccgcagggaggagccggagcttaccgagtttacgccgggtcatcaggtagcctgccacagggccggagaactcgatttgagaattgttgaggaataggcaggaggataaagctatgattaaatttttgaagaaaaataaggggattgcggccggcctgttcatcctgactatcattgtctgcctggcggtgtttgccgactttttaactccttatgcatttgatacgataacgctgtcggataaattacagccgccaagcgccgcccacatcatgggtacggataatttcggccgtgatatctggacaagagttatctacggagccagaatttccctgaccgtatcgctggcggccgtggcgctgggactggttctcggctgcctgctcggcctgatgggcggatacttcaaaggcccgtttgactttgccctgggccgtgttatggacatattcatgtcatttccttcgattcttctctcactgttaatcggaatcgccctgggaccgtccattctcaacatgtgcctatccctgggaattccgctgataccggcattctaccgcgtcacaaggggagcggccctgaatgtgggggagagaacttatgttatggcggccaggtccatgggcacgaaaagcagtaagattttgttccgccacattctgcccaacactctgccgcagatttttgtaattctgtccttcagtgtcggcggctccatcatggcggaatcttccctgggttatctgggcttcggtattccaaagccgacaccgtcctgggggcttgtaatcagcgagggcaagagctacatattcaacgccccgtggattgccggtttttccggcctgatgattgcgcttacaatctttgcattcaaccttttgggagacggtatcagagattacctggatccgaaattaaaataatggcagtgacgctttaggaggtacgaagttggagaatgataaaattttggaaataaaaaatctgtttgtaaaatttccaatggacggcggaacaattaatgcggtaaacggcgttaacctgtcactgggtaaaggtgaaactctgggagtggtaggcgagtccggctgcggaaagagcgttacgatgtcaacgattctacggcttgtaaagacgccgcctgcaaggattgagggggagatttactataaggggcagaatattctggatatgccgatgcgggattttaccagaatcagagggaaagagatatcaatgatatttcaggagccgatgaccagtctcgatccggtcattaaaatcgggccgcagatagcagagagcctgatgctgcatgaaaaacttctgaagaatgcggctatggcaaaggcgctggagcttttgaaacaggtggagattcccaacgcggaaaagcggattaatgattacccgcaccagttatccggcggtatgcgccagagagtcatgattgcaatggcgctggcctgtaaaccgcagattctgctggcggacgaaccgacgacagctcttgatgtaacaatacaggcgcagattatggatttgatcaagaagctgagaggcgaatacggaatgagcatcatgatagtaactcatgacctgggtgttatttccgatgtagccgatcgcgtcgtcgtattttacagcggccagattgttgaggaggcccgcacggccgacctctttaagcatccgaagcacccttacacaaaggggctgctggcatgtataccgaccctgcagacaaaagcgcagcgcttacaggttatcgaaggaaatatcgcagatccggcaaaccgcccaagcggctgtcctttccacccaagatgccgttatgcgacggagcggtgcaggaaagagaacccgaagctgtatccatgcggagacggccatatggcggcctgccatctgatggaagataacggctgacggcggatgagcaggaaaggaaaattaacagaataaaggaacgggacggccggttaagaaaaatggaagacggccggttaagttcaggaggaaactatgtcaagaataacgactgtatgcggcgatattgcgccggaagagctgggatacaccgatatgcatgagcatgtgatgttcgacggaacagatatgggaaacatctgccgccccgggatgccgggaaatcttccaatccaatgggaagataagatatcgttggaaaatatcggccttttgaagcgtaacttcacgctgtgccgggatgcaatgaatctggacgacgaggaggttatgacgggagaggtggctgattataaagagtcgggaggggattcacttctggaactgagtgttcccgggatccggctgaacgtggctgcaatcaaaagaatctcagaaaaaacgggagttaacattattacggcaaccggattttatatcgaatcatcgtggatgggccgttttgacggatggaatacagcggatttctataaacgtatcatggacgaatttgagaacggaattgagggaaccggaataaaaccaggatgtgttaaaatcgctctttccagcttcacccaaagagaggagatgtccctgagggcaggcgggcaggcggcgaaggaaacgggaatgtccataacggtgcatccctgcggccggggaggaggagaacccggtaaggtggtggagatcttaaaggaagaaggcgtaccggcggaaaaaatagtcattgcccatgtgccgatggccaataaccggggattatctgagatgattcgctatccggagctgtgggcgcttaaccttgatgtggcaaagtcaatactggcggaaggagccaatatatcggtcgaattcatgtccgggcagatagatttagaggcgctgggctcccagtccaatccggattatatgaagctggcaggtcttgtaaagctgatcaatgaaggccactgccgtcagatggtgctggggaccgacatgtgcgtgaaaacaatgaccagacgctgcggcggagagggctactgccggctgaccaaatttgccgtgccggcattgaagcagtacggcggtgtatcggattatgctgtcagaagcatcatgattgaaaatccggccaggattctggcgtattaagagccggaaataacagcggattaaatgaaaactaaaaacttaatataaaaagaaagaggtataaaatcatggcagaaatgtacaaagtaaaattaaccgtattaaaaacagcaatttatccggaactggcagaaaaatatttatcgatcggaaaagaactgaaaccatgcggcggctttaaggaaggccaggaaattattgtagacgcctttatgaactgtccggagggcttctgcgcccaagcctgggccgcgctctatccacagatgcttactatcagccgcggcggttcctatgcgccatggacaaaagaggatggtgtggaagtcggctgctgtacagacggcctcagaccggtgacattcctgatcgagagagacgaagtacagccatttgacgtatagccaattgaataatccccctgttatgatatactatgagcacttgatgaggttccccacgaatctagtgcgagtcatatctggacacttagcgaggtattaaacgagcttagtgaccaggatatactatgagcacttgatgaggttccccacgaatctagtgcgagtcatatctggacacttagcgaggtattaaacgagcttagtgaccaggatatactatgagcacttgatgaggttccccacgaatctagtgaacatgatagctggaggcatatatggataagcaggacaagattgcagtactgattgacgcagaaaacgtttctaaaaagtacattaaactgattatggatgaagtgagcgactatgggatcgctacatacaaacggatttacggtgattttacaaatcccagtgttatggcatggcaggatgcgctcagagattttgcactgacgccggtatttcagtttaactatacgaaaggaaagaatgcgtcggactccgccctgattatcgacgcgatggatatcttatattcgggaaaagtaaatggattctgtctggtaacctccgacagtgattttacgaagctggcgattcgtctccgcgaggccgggatgattgtaattggaatgggggaacagaagactccgaattctctggtatcggcctgcgagacattcaaattccttgatttactgtatcaggagagcctggaagaacaggcggaggacgagaagctttctgaagttaaggcagcaaaagcggcagaaccgcctgcggcaatccgtccctcggacgaacgcgatacgaagaaagccccggaggcaaagacaaagccccacccggttgaaactgcggatactccggatgacaaagccgacaatttaaaggatgatgccagactcaacaatgtgccgacgaaggaggaaatcggcgctgagatagtagccataattgagtccagatccgatgagaacggatggattaaccagtcggagataggaacggtacttcccaaaagagttcctggctttgatccacgaaactataaatgcaagaaactgggccaatttattgaaagctttgattatcttgagacaagaacgatgaaaaatccgaacaacaaattattaaaagtggtttatgtaaaaattaaacagcagtaaatgaaagtccgaaatcccggaatccccggagatttcggacttttaagtattgaaggcggcctgtgcgcggagcatgcagaataacggtatgggattatgcaagccggatttacagtattgtaaattgtatgtataaatattgaataaaaaaagcaaatttctttaatgactttgcttactaaaaatgttatccttgaatcagaaataaattccacacacaatttttccttacttaatttaaaacaacaatagcgataataataacaaatcaattcagtgtttcttttgaattaaaaatgagctcacatagtaaaaaatggtgtacaccgggagactgcatatcaatttgatatgattattgtctgtcggttttttcattcaaagctatggaaaaaggaaagatttatgatacacttgaaacaaaaacagactacaaggagtgctgcagatggattcgaacgaaatatttattaaagatattccagcatttttcaggaggtttaaaggcagtactaaagacggacagtatgatctgtattgccaggagtttgcttacagtattatatatggaaacctgaacagcagccatgtggatgaaattcttcagttgattggattgagctgtctgcctgaccggcttttgctggtacagacagactacaatgatgtgttccagttttatcctgaatttaatcagtttcccaggagatttaaccagacgcagacgcttcaaagatgtgtgaagcgaagcggaattgaggggctggtcgcatcctacccggcgcggggcgtggtcggtgtcttcctgtgtacggggcaggaatcgtcttctgaagagaaagtaataacggagaaaatcagggaacttgcaaaggatatgattgtacgggtcaacgaagaggtgggagagagtgttgcgattgggataagccgatattgcagcagcctgtcgcgtttcccgcaggcttatgccgagtgtaaggagggactgtttcactgcttcaggctggggaaaaaccacatggtatttcataaagatatatgcgaacccaggacaccgttttcacgggatgtgctgaaaacctttggggctgagattgtctccgggatcacgaatggagagcgggcggcggtaaaggaccatgtggatgagatgatgaaatacatgctgtccgtggcaatgtcgcccattaacatacgtctgatcctggtgagttttgtagatacattgagagaacgcttttacaactccagaataccggccgatatattggaaaaagcgtatctgaacacatccaaacaagtcataaacggcatgtttgcagacgatataaaggagacgatggagcagttctgtgatatgttgataaaagaactgggggcggagtcgcaaagttccgaggaactgctgtttcacaaaattgatgaggccattgaaaaatattatcccaacagtgagtttaacctggatgtaatggcaaatctgttccattacagctcctatcattttggccgtctctttaaaaacacacggggagaatccttccggcagtatctagccaggtaccggatcgagagggcgaaagaatttctggccagggggacaagccgaatgaagtggcatttcagaccggatttaacagcatcagttatttttgtactgtttttaagaacctgacgggcgtttcaccgaaacagtatcaggagaattttataaaataatcggaacggatatagttccaggcggtgacctgtgcgcagagcgtgcaggttatcgctatttatttgtctatatcgagccctttgtcgaaaaaaatataatttatcatttactttattagtaaaaatatagtattatattattttgtaaaaacagatcggattcagcagggggaggagtaatggacgttgaagtttttgacggaagtgaaccggcatataaacagctttgtgaaaagattataaaagcaataacagagggagagcttaaacctggtgacagacttccctccgaagcggcgctgtaccattctaccggtctctccaagggaacgatccgcatggcctatgaggagctggaacataaggggtgcattaaaagaagcaggggaagcggaacctatatccaggaatggagatcggaaagacaaaaaatgcaggcttacagggagaaggttctcagggccggaataccggctgaggaggcatttcagctgattgaggaggcatgccggaaaaaattcagtaaaaaggaagaggtacaggctgccctttttgactgcacgcctgaaattgccgcggatatctcccgcaaaatagaggagcgatttaagttccttccagtatgttatgacgtttatgaagtccttgaagcattcggcggtattgtcccggaggcagaactctggctgacgacgacggctcattatcatgaattacagaatctggcaaaggcctataataaaacactgataaagttacagatctcggtagacgacaaagtagtggagacattgtcggggcttagcggttcatgtatagtgggaattatctatgagagccgggattttattaaacatgtaagccttcttacatcatctctgtgtaagcataatacgtattttatctgccggaaagacgaatggaaggacaggaggagtttacttgattcaaaacctgtctgttggattgttccggcccgctatgaggaaatgaagacggaggcggaaaaagaggagaatatggatgttctgttttaccgttataagatacttcctgattcctatacagacctggaagcatatctgcaggaggtatagatgaaagagaaaacgccgatttatagaaaaatcataaaagatatccaggataaagtggaggacggaacatatcaatccggtcagaaacttccgagtgaaagggaattatgcaagcaatatcaggtcgcacgcggtacgctgaaagcagctctttcacaattaaagcaagccggacttctggaacaggcgaggggaagcgggacatttgtaagagaaaaaggaaaaaagcagtcctgttatcaaaacgctaaaaaactggtcgacgagctttatgcaatgcacctgacggaggaagaaatactccggctggcaagcgagatattattggggcagatggataattaaaccggggagaacgctccggactataccactttgtaaagcgtatgtatgaatattgttgaaaaaagcatatttctttaatgactttacttatcaaaaatgatatcctttaaccataaagaaattccacacacaaatttccttacattttaaacaagtctattcagtgattctctgaacgcaatgtgagctcacatattaacaaatggtgtacaccgggagacagcatatcagatatggtatggttaatgtctgtcggttttttgttgaatttttgaaaaacgggagatttttatgaagcaaatgaagacggagggcaaagagatgccggtttcggcagatcttgtgtttttcaacggaaagatagcaaaagtcgatcggaaatttggcttttgcactgcaattgcggtaaaggacggatggattattgatatcggcagtgatgaagaaatgaaatgccacatcggagaagcgacagaggcggttgatttgaatggcaggctgatgctccccgggtcccaggactgccatactcacgcctgcctggcggggctttataaaatgccatggtttctggacgtgggagcggataaggtgtcctgtcttgccgatctcagaaaaatcctcgctgaggctgcggcagagatgccaaagggtcagtggatcatgggatccggcctcagcccgggcagtattaaggaatgtgccgatgcacagcggcagatcacgcggtgggatatcgatgaggcggtgccggagcatcccgtatggctggctaacagcggtctgcaccatatacttgttaacacgaaggcgctggaactggcaggaatcacaaaagacacaccggatttagagcgacatgagggaaagattcagagaagagaagacggtgaaccgacagggtatctggacgactttatgctgatggacaaagtcgggagagtttcgccccggctgagcgacgggcagcttcgcgaatgcatcaggctgattcagaaagaaatgaatgaaaatggcgttacaagccacaccgatatggtcggaatcggaggggattatctgtttgccggtacaggcggctcccgggttatcgatatgtatgagcagatggccaaggagggagagcttacggccagagtttccgtaaatattatggcggggctgaacggtctttccacttatgattcgattatcggcggagccgccgctaaaaaggttccggcactgacggacagaaaatgggtggatgcctgtgccgtcaagctgtttggagacagcatgtggctgcgccccgacggaagaaaaacgggagggagcagttattttcccggtaatacaatagaagagcagcaggaagaaataacacgaaccatcgtggagctccaccggatgggataccagataggaatccattccactggaggctgcgggatcgataccattgtggatgcctatgttaaagcgatggagctgtaccctgggaaaaacctgcgccattttgtgattcacggtgacgatttctcggaagataacatgaagaaatgcgcaaagaaccatattgtgctgtcctcccaggccgtggctccctggggattcatggaatccctggtggactgtgtggatccggaagaaccttcgcatatgttcgattaccagagatttatggataacggcgttgtcgtaagccagggttccgacgccccctgcatgaccgttaactggctgatgggactgaagttcgcgatgacgcggacgactgtctccggcacctgctataacaggggaaacggctgtacgattgaggacggaatcaggatgtatacgattaacggcgcataccagaaccacagagaagatgttacgggcagcattgaggttgacaagctggcggatctgcaggtgcttgacaccgatatctttgagatatccccggaacagtttgacgatgtcagggttgtgatgaccgtgacgggtggaaaaattgtttattcccgggagcaggattcaatcagaattgtctgagaaccggaacgataaataagtaagagtaatacaataaaaatcaacaggagaagtcgaatatggaatatacgtatttggggcgtacggggctgaaggtgagccgcttttgccttggaacaatgaattttggaacatccaccagcgagaaggatgcattttatatcatggataaggcggtggatgcaggcattaatttctttgatacggccgacgcctacggcggcttcgccggcgagggagaacacggactgacggagaagataatcggaaagtggtttgcccagggcggcaaaagaagggaacgcgtaatcctggccacgaaagttttcgctacgatggaagatccgctggaggggccgaatgacgaagacggcttgtcggcttggaaagtccgcaggcatatggaagactcgctgaaacgccttcagacagaccatgtcgatctgtattatatgcatcatatcgaccgccatgtgacatggcctgagatgtgggggtgatggaagttctggttaacagcggaaaggcaacctacatcgcatcctccaactttgcaggccacgatttggtccgggcgcagtgggaggccgataaacgccacttccttggtctggtggcggagcagcaccaataccaccttctgtcaagacttccggagctggaagtgattccggccgccagggagcttgggctgggctttgtcacctactcacctctggcaggagggatgctgggagagaatgccctgaaacgcctgagcggatcgcgcggtgagaaccgtcactattccgaggcgatgattaagacgctcacggacttcgcggatttctgccgggaactgggagagaagcagtccgatgtggcaatggcatggattctgaaaaatccggttgtcacaagccctctgatcgggcccaggacgccggaacatctcgataatatcctgcatgcgctggatgtaaagctggatgacagcgcgatgaaacgtctggatgaaatcttcccgggaccgggggagaggcaccggatagttatgcctggtaaaggataaggataaaaagatataacaggtaatttttaacatgaacagacggtaacagaataggggattctctgagaagagaaaagcccttcttctgttaccgtctgtttcaatttggattcgcggtgaaaggtaattcacgatccattccacgtggagcgtgactggcccgcccaactgttatataccacgcggtaaaattcagagttttttttaaagtggtcgctgttgttttgtgatgataattctgtaacaatatgttaatattctggcatagatgcatatttttataaaatatacaaaaattacaggggataaaggggtaaaatttactaattcgaaggcggagaggggtaagtaattgaaatattcatttatataatatcacggatttaaccgtgaattgaaaggagccagaatatgaaaaaaataagattactgacaacagcggcggcaatagcgctctttgcatcaatgatattgaccggctgcggcggaggcgggaaagcggcggacacaggggggagctcagcggttcagcaaagctccggggacagtggtgagaagatgctgaaagttgcaacacattgggagaaggccacctttgatccggcgctctggggagacggaggcagtgtcaaggcaggtatatccatctttgaaaccttactggccctggatgaagacagaaacctgattccgagcctggcggagagctgggatgtatccgacgacagaaaaacatacacctttcatctgaggaaaggtgtccggttccatgccggctatggagagctgacatcggaggatgtggcatacacactggagcgcctgagtgatccggaggtaggggctaccgatacgaaatcaaaatgcaaggtggacaacatcgaatccatggacacatcagatccctatgtgtttgtactccatttaaaggaagcagacaatgagatcctgatggattttgcgtcatggtatacgaacataataagcaagaaagcttatgaagagcttaaaccgtcgggattcggtgcaaaaccggtcggaacggggcccttcgaatatgaatcgggcaaaccggcggaggcatacatcgttaaacgatttgatgactactggggagaaaaagcactgctggacaaagttcagattacaatgctggctgacgagtcgagccggattaacctgtataacgcgggcgaagtcgatatcatgtcattaaatgattccaacaatatcctgaaattcggagaaacagaggggtgcgaggtgaagaaagtcgcaggcgcaggctgttactacctgggaatgaacctggaaaaagagccgttcaccaatccgaaggtcagggaagccctgaaatatgcgatcaattatgacgaaatgctcaacgactactggagaggaacgctgttcccgcctaccggctacgttcagtcctactgtatctatgccagtacggcagaggagagcggctttacatatgaatataatcccgaaaaggcaaaacagcttttggcggaagccggctatccggacggattttccacatcggttgcttctccgaacgatacgctgtcaaaaggaccgctgcttgtgatccaggagtatatggctgatatcggtattgatatgcagttaaatctttcagagttcgctactttcctcgacgatgtaaggaacggacgccacgatatgtggttcctggttaacggcgacggttaccgcggcgatcagtggctcacctccttcaccagcgaaaagattccgggaagcaactggtgtcagttcagaaacgaggagtttgatgaacttgtggcaaagggctttgaagcaacggaaaaggccgacaaagataaatattttggagatgcccagaaaattcttgtggagagcataccatcgattccgattgcggaatcaacgggcgatatccttgttaaagatacggtaaagggcttctcacttaatccggaactccttttccagtttaagtatatggatttgcagtaattaacggctgcgttttctgcggcagtgaaccacaaaaaatgctgccgcaggaaacggatggaggggaaacatgaagcgttacattttaaaacgtctgttatttgcggttcccacgattttagggagtatgatggtagtgtttctgattatacgttcgattccgggagacccggtagcgatgaaattcggtaaatcagccaccgtccaggagatagaggagtacagggaggaatatgggtataaccggcctatggcggtgcagatggtggattcgattattgacacattccgcggtgatttgggatattcgatggcaaataaccagccggtatttgatatgattctggactgcctgccgaatacgctggaactgacaattttcggagtgctgctggcaatcgttttgggtgtcacatcaggaatatttgcagctctttaccggggcagcatcttcgacatgatgatactgagcctgaatacgcttctgatgtcgatgccctcgtttttcttggggctagtgcttattattgtattcggagttcagcttaagctgattcctgtcataggtcttaacctggcgccggagcagcattttgcagggcttatcggaccggtgattacggtcggcctcggttccgcagcatctattgccaggactacgagaacttccatgctcaagattctcggcaatgattttatcaaagtctgcaagtccaagggaatcgcaaagagcgccattataattaagcatgccctgagaaatgccctgacaccgattattacggttgtgggagggacatttgccgcgtatctgggcggggcggtggttacggagacggtattcgccaggccgggtatcggcaagcttcttgtcgatgccatcaatgccagggattacacggttattcagggaacagccgtatttttggcggtatttatgattcttgtaattctggtaacggatattctgtacggtattttcgatccgcgtatccgggttcaggattcgtaacagttcaaacggcataccaggataatgctaaataatataaactggaattggaaggttgacttatggctgaacaaaatatagatgataaagagaataaagcaatagaaacagataaagaaataatactggaagtgaaggatgtcaaaaagtggttcccaaacgcggctaagagtaaagagtatattaaggccgttgacggcgtgtctctttcgattcgtaaaggcgaaaccttcggcctggtaggcgagtcaggatgtggaaaaagcacgctttccagcctgattctttctttgcataaagcaacggcaggcgaggtgtattttcacggaaagccggtttacaaaatgaattccaggcagcttcgcgaagtgcgcagggaaatgcaggttattttccaggatccctatgaggcgctggatccttatctcacaatcgaagaaattataatggaacctctcgatatccacaagttcggcacaaagcaggaaaagcgtgaaaaggtggaagaaatgtgccgcctcgtgggccttcccgtcaaccttctcaccaggatgccgcatcagctgtccggcggccagaggcagagggtgaatattgcaaggagtctggccctcaacccggaattcgttatctgtgacgaagctgtttccgcgctggacgtgtcggttcaggcacagatactgaacctgctccggcacctgcagaaagaactggggctgacataccttttcatatcccacaatttatcggtggtaaaatacatatctgatacaatcggcgttatgtatttcgggcatctggtggaggtagctccgaagaatgaactgttttcggatgtaaaacatccgtatacccatgcgctgctgtcagccgttccgctgccggatcctgattatcaggtgaatacggaagctttgacaggcgatgtgccgagtcttttaaatccgccgtcaggctgtattttccatgagagatgcccatacaggcaggagcggtgcgagcgggaagcgcccgggcttgagtacgtatcagagagccatcaggcggcctgtcaccgctataaagaacttacattaaagctggattacaactccggttttggaaaaggaggggaaggctgatgataaaacggctgctgcataataaaatggtcgtattcgggacagtagtgatactggcaatgatttttctggcagttgcagctccctggctgacaccttacgattacaagacgaatcatctgggcgaacggcttctggcgccgtcgtcccttcatcttatgggaaccgacgattacggaaaggatgtatggacgagattgatatacggagccagggtatcgctcaaggtgtcttttttatccgtaatgctggccctctccatcggaagtaccatcggatttatctgcggctacttccggggaaaaatggatttctttgttgggcgtatgatggatatcatgatggcgtttccatctatgcttctgtctatgattatcgcaatctgttttggttccacggaaaccagaatgtgtctggctatcggaatccctgtaattcccggattttaccggattgcacggagcgaaaccctgtccatacgtgaacgcacctttgttatggcgtccaaaactatggggcggggagcagatacacgatattcaaacatattattcccaatgccctgccacagatttttatcacgctgtcaggaaccatcggcggctgtatcatggcggaatcgtctctcggatttttagggctgggaatcgcaccaccgacaccgtcctggggaatgattatcaacgagggaaaagatgttttcatcgacgcgccctgggttgccatcttcggcggtcttatgatcacgctgacaacgcttgccttcaatcttctgggggacggtttgagggacgtactcgatccgaggctgagaagcaattgattgctgcggcgattcgaacgggagaaccaggcagcagaaaaggagagcggatatatggagcatttgcttgagattaaagatttgaaggtggaatttccgtcgaaagcggggaacattcacgctgtaaacggcgtgaatctgtatgttgacgaaggagaaatccttggcgttgtgggagaatcaggatgtgggaagagcgtgactttgtccaatgtcctggggcttgtggaagcgccgcccgctgttatcagcggagaaatatgttttaatggggaaaatattttatataaaaaggataaggaattccgcaaaataaggggtaaggagattgccatgattttccaggatcctatgaactgcctggatccggtcatccgggtcggaaagcagattatggagatgctcctggagcatgaggatatggacaagaagcaggcgtatgacgaggcggtgaagcttctgaaggtggtaggaataccggatccagaaatcaggatgagcagttatccgcaccagttgtccggcggtatgtgtcagagagtgatgatagcaattgcgctggcctgtaagccgaaactgcttttggcggatgaaccgacgacggctctggatgtgacgatacaggctcagattctcggattgctgaagagtatccgggatcaattcgggaccagtattattattgtcactcatgatctgggagtggtggcaacgttagcgcagcgtatcgccgttttttacggcgggaaggttgtggaggaggcggcgacgagagcaatatttaagaatccgacacatccctatacaaaaggtctgatcgcatgtgtccccagcctggcggccggggatgaagatttgaacgtgatagaaggaaatgttcctgatttgtcaaatatgccgcccgggtgtcctttccttccgagatgccggtatgcttcggatgaatgtaaaagcggagagctggaacagctgaaggtatcggaaggacattatacgctttgcagaaattacagggagacagaaaatgcagccacaggaaagcagttacagaaagagtagatgaagaaagaacggataaaggaaacataagcaggtgaatgagaggaagccggatatgaagaaggttgtaacagttacgggagagataaagcctgaggagcttggatttaccgatatgcatgaacatattctgatgaaaggacgcattttcagggagcagttcaaagaggaacatccgggatttaaagagacggttggagaggatgaaaaaaatacgctggaaaatatcggaattatccgcagaaataatatgtttacctgggatacccaggatctggacgatccggccgttatggaaaaagaggttgccgattttaaggcggccggcggccggtcgctggtggaaatgagcgtccccggtatccgcggcgatatccgggcggttaaaacaatagcacaaaacacaggggttaatgtgatcggtacaacgggaatttatatctatgagtcctggccggagtggtgccacgaagcagagataaaagattttatgaattttatgaagcaggagatcgaggaagggattgagggcaccggcatccgcccggggatgattaaagtcggaatttcttcgggatttcgtccgagggaagagcttctcctccgggctgcggccagaacggccaatgaaaccggcctttcactgacggttcatccctgtttcaccatgggcggaggccccctggaaatagctaagatcctgaaagaagaaaatgtggatatggagagaaccgtcattgcccatatgggggcatttctgggagaaggaagtctgaagacattgattactaaccagaaaagctggggaatcagcctcgattacctgcaccgggtgcttgatacgggggttaacatctgcattgaaatatgcaacacctccgacagggaagccacaggctccgccagtattccgggatggatgaggctggcggccgtatatcagctgattcaggaagagtatgcggctcagcttgttctcgctacggatacgtgtgcaaaacatatggccaggtattacggcggagaagggtatggacgcctgacccggtttgccattccgacactccgcgatattgtcggggtttctccctatgccattaaccagattatggtaaagaacccggccagaatactggcgtattagggttactattcacagcccaatgtcattgagtaacatattaggaggaagtcacaatgcagagagcagacacgattttagtgaatggagtgatttgtaccgttgatccgtcatttcgatttgtacaggccctggctgtgggagatgataaaattttgtattgcggaaataaccgtcaggcgcttcagcttcagggagacggcacaaagatcatcgatctcgaaggaaaactggttctgccgggaacgtttgacgcccatatccatgcggcttacgccggactcagtctctcccctgattttgtcaaagtggaaccggaggatgcctccaatctgaaagaattgaatgacagaatccgggaaaaagccgggaacctgccggcggatacctggattatcggctggggatttaagatccggcaggtagaagagtgggccagggaagaacggatgccgacctggaaagatatagaagagggctcactggggcatccggtcattctcaacgacggcggcctgcataccatgctggtcagcaaacaggcgctcaaactggcggggattacaaaagatacccgttttaaaaaggaagagggcatcatgttccggtttgaagacggcagcccgaccggcctgtttaccgatttcgggactcaggcagcggtgggaagagcagcatatcatctgcagggacgggagatggatgaatgcctgatacggatgcagaggaagatgaacagctacggcattacctcccataatgatatcgtggggccgggcggtaatgatatttgtttcggtacctacggtgaagaagcgatccgtggttatgagaggcttaggagagaagggaaactgacagcccgcgtatttatcaatctgctcgcgggaaagggcggtgtccagagctatgataccattatcggaggactcgaagagatgaatctgcctgaatttggcgatcggaagtgggttcgggctgatgctgttaaaatctttggggatgacggctgggagcgggatttgccgccggaaaaaaacggctactgtatgtttccgggagagacacaggaagagcagggggaagagctgcgaagaacaatcagggagcttcaccacaggggctggcagacggcgattcatctcacaggaggcagggggatcgatatctcggtggatgctctttcagaagcagaggaagaggaacctggccgcgatcttcgccattttatactccatgccagcagttccagtaaagaaaacattaaaaagtgtgtgagacatgaaatagggtgcggggcacaggcagtgggcggttacgaatttggcggggagacggattataaagtcctgctggacggaggtatgctggttgctgagggttccgatgccccggccctgccgatgaactggatgaaggggctgcatttcctggtcagcagaagggcaaaggacgggaaggtatatcatcctgaaatggctattgatatcagagaggctgtccgtatgtacacaatctatccggcataccaaaaccatgctgaagatatctgtgggtcactggaagtgggaaaatgtgcggatttacaggttctcgaccggaatatttttgaaataccggctgacgagattgagcatacggaagtgcttatgacgatgtgtggcggcagagtcgtttaccgaaaaggtgacagtatttagcactagaaaaagagggacccgtacgcatgcgggtccctctaagctattttttcctggaaaaattgtatgctttcatcgttgtgcgtacgctctttccacgcttattttctcttttaaagccaatcatccggccgggatcggcttcaccaaccaggataccgggtttttgtttttttgccagaaccataatgtctgccgcatcctcccttgtgaagaaaagccgccggatcctgtcacccttgctgatatggagggccaccagctccggatgattcctatcctcaagcgtcacggaatcaatctgctcccagctccagaaatcatactgtgtggtaatatgcatctgataaaaaatttcaagcccgcgcttggtgattaccgtatccttttgcatttttaaggcaagtatgtataacaggccaaatataaatgcaacgcgatacggtgtaatgactcctgcagccagaagcaggccggacataaaccaactgcctgccgtaacccatttgctgcgctgctttaattctctggcatgatattttgggccggctgttaattcccatgggagataatctgctctcgttctcacataaaaccattcctttccgttctactgttatcagtggtcaggctttctttacgccggttgggacaggggccttgccggcagcacggagagcttccagtctttcaagggcgtacgcatgttctttgggaggcgcagcggccgctttacgcattgtggtcttaccgaaaatgctggtataggcgccgtcggcccagaacacattgcgtttcaggcaggcggtgatcccgccgtaaatcggattcagaagatttacaaatgcatatgggaaatatacgaaggggtgcacgcccagggttgcatactgataagcgccgcagccggtccacgggaacataacggcccacagggtcccgcagtcctcaagggtacgggaaagcatgtttcgggccaggcccatctcatcgtatttatctctgtacagggggccaggaacaccaattcccaggaactggtcacacatggtagcgtcgcagaacagggatgtgaccagggttaatacaaccagacctcctacattgtggattttactcttgataccgctgaaaagtgtttcgacacagccgcaccgttccagcgctccgccgtaggctacggccagcagtatcaggttgatggtccacatctggtgatccatgccgccgcggctcagcagattgttagccagttcattgctgctttcaaatgtggttccgtaatggagaatgttaaaaatatcactgacattagtgattccctggaaaacagccccaaagaggacaccgcagcccacggaaatggcgaggcctggcaaggccggcagttttaacacacatacaacgacaaccacaacgatgggcaacagaagcaccggatttaagttgtatccgcctgcaagagcctgctggagttccagggcaaccgtgttgtcatatccggtcgttgaatagccaaaacctatgattgtatacaggaccaaagcaatcacgaaggttggagccgttgttgataccattgcggtaacatgatcaaagaggcctgtttccgagactgcggcggccagattggtggtatctgacagcggagaaaatttgtctcccacataagctccggatataatcataccggctgtcagcgcaaccggcatgcccaggccggctccaatccccataaaagcaatacctatggttgcggtggtggtccaggaagaaccgcaggccagaccgacaacggcgcacaggatgcagccgaccggcagaaacagctttggagtcagcagatccagtccgtaatagatcagggccggaatcgtgccggacatgataaaagatgccaccagaatgccgaccgtgcaaagaataagaatcgcttccattgtacggttcagacagtccagcatacctgccatcatatctgaaaaagagtggccgcagatacagccgataatacaggctacaacaatggagacaagcagcggcatatgcgcatctccgtaactggtgccggccataaagtgatacaacatcaggcctaacattacgacaatgggtaacaatgcctcaaaaacgttgggaagacgaaccgtacgctgttttttttctttttcactcattttaaaccctctctttcttaatcattgcatactgtttttccaacaggaaaagccgccccctgcagaacgcaatccttctcaattccaaacgccagaccgtcacggagagaagaatatatacattctgcaggggcgactagttacctgtcacttaataccacggcacgtcatttactatcagcccggagccgcggcattaactgctttgttcctaattttccaacatacagctgaagcagacacacctcctttcttacataggaaaatatagttatatataatctttcgttacttcatttttgtttctgttttaccagatttttattaagtttatcatagtctccaaagcgtcgaaaaagcgtcaaaacctgtaaagatagtgataagaaaatggcaggcggaatgctgttgcagttcacacgtttttcggttgacatttttttaagtcaggaatagaataaaaacagacataaagttagctatctaacagtgataatgctaataatttatgcgatgcagtacaaggagagtgaggagaagaacttatgaaagtatcattttacatgctgctgtaccgggcctttcacgcccagaggaagtgcctgaggcccttcatggcggaacttggcctggccccgggccagccgaaggtgctgctgtacctggccggccacgatggctgtatgcagaaggacgtcgcggagcactgtgacattgagccggccacaacaagccgtgtgctggatacattggaaaaaaacggttttattgtccgcaagacgatggagggaaaccgccgcgcaggcagtatcctgataacggagaaaggacgggaagttgtggaaaagtgggtagggcactgtcacgaggcggaggcttccatgctgaccggatttacggaggaggagacggcgcagtttggcgattttttaagccgggcttataaaaatatgagtggtaaagaagcaagatagcagaacgttactattcacagccccgcagaaaaacgcgttttctgtgaaccgtaacagctaaacagcaactcagtggaggcataagagtcatgaaggatttaaaaaggattttaaagtttactagaccataccggttagatttctcgctggcaattttctttgtcgtgattgaaaccagctttgaactgatcatcccaatgatcatggccggaatcttggacgtgggcgttgccggccgggatttgaactacattttttccagaggcggtctgatggcagcttgttcgatcatttcactaggcaccggccttttgtatgccaggtactccgcccgggcggcaggagggtttggcgcgggctgcgtgaggcggaatatgaaaaactccaggaatattccttcgggaatctggatcattttgagacctcttccatgatcacacgactcacaacagatgtgaccgtaatgcagaatgcaattgtcggaggaatgaggccgataatccgaggcccggtcatgatggtattggggcttgtcatggcctgctatatgaatgcgcggctggcgctcgtatttgccgtctgcatgcctgtgctggcggcaattctgattgtgattatcagcagagtggcgccgatgtacggcaggctgcagaaggcggttgatcgtgtcaatggagtggttcaggagaacctgacggcaatccgcgtcgtaaaggcgttcgtcagggggagtacgaggaggaaaaatttgcggaggtaaataataatctgaagagaactagcgagagaaccttccattttgccgttctcaatatgccgtcctttcttttgaccatgtatgcggcaattattctgattctgtggtttgggggacagatgattcaaacaggaggaatgcaggtcggtgaactgacgggattcctgagctatgttatgcagattatgaattccctgacgatgatatccaatgtatttctgatgctgacccgctctctggccagtgcaaagagaattggcgaggtttttgatgaaccgctggatttaatggacgggagcgagccggaagccaaaatcgaacacggaaccatcgattttgagcatgtctcatttaaatataagaaggaagcaaagcgcaatgtcctgaatgacatcaatatacacattgaagaggggcagacggttggaattatcggggaaccggttccgccaaaagcactcttgtctctctgataccgcgcctctatgatgccacagagggaagcgtgaaagtggacgggcgggatgtgcgtgaatactcccttacacacctgcgcgatgccattggtattgtactccagaagaatgttcttttttcaggtacaatccgggagaatttgaaatggggcaatctgaatgcagatgagaaggaaatcgagtgggcctgccgggcggcctgtgtggatgagttcatcggacgttttccggagggatatgatacggatctgggacagggaggagtcaacgtatccggcggacaaaagcagagactctgcatcgccagggtgcttcttaagaggccgaaagtcttgatatttgacgattccaccagcgctgtggacacggccacggatgcaaagatcagaaagcatctggccggcctcgccgacacgacgaaaatcattatagcccagagaattacgtccgttatggattccgatcagattattattcttgaagatggagagatacatgcggccgggacccacaaaagcctcctcgaatcggatccgatttatcaggagctttattattcccagcagaaaggagctgatgaagatggcaagacagtttagcgccaagaggcctgaaaacctgaaaggcacaatatgcaagcttctcggatatatgggtaaccataaattcctgtttcttctggttgccctgctgacgacggtcagcgcatcggccggtctgtacggcacctatatgctgaaaccgattgtcaatgattatattgtgccggggaatatgagaggacttttttatgctgttcttgtaatgggagctgtctatctggccggtgtattatcttcattcggatatacacagcttatggtaatggcagcgcagaaaattactgcggaaatcaggaaggatttattctgtcatattcagaagctgccccttaaatattttgataccagaacccacggcgatattatgagccgttttactaacgatgtggatacggtttcagatgcgcttaacaacagttttgcaatggtaatccagagctttattcagatagtcggcacgctcaccttgattttcatcctgaactggcgcctgtcactgattgtatttgcctgctacattctgatgtttgcctatatccggtacagcggacaaaagagcaaatattatttcaatttccagcagaaatacctgggcgagctgaacggttacattgaagagatgacagccggacagaaggtagtaaaagtattcaaccatgagaaagagaatattgaacggtttaataagaagaacagacagttaaagcaggcggctgtcagcgctctgacctactccggcactatggttccgatggttgtcagtatctcttatgtcaactatacgatcgtgacgatggtaggcgcatttatggccttgaaaggctggaccgatattggaagtctcgcaagctatcttgtctttgtaaggcagacggcgatgccgatcaaccagtttacgctgcagtcaaactttcttctggcggccctggccggagcggagagaatcttcgagaccatggaggaggaaccggaggcggatgaaggccgtgtcacactcgtgaatgtaataagagcggaggacggtccgctcacagaatgcccggagaagacagggagctgggcctggaaaaccgaggatgggggattgattccgctcagaggcgacgtacaatttaaaaatgtggatttcggctatgaaaagggccggctgatattgaaaaatatcagtctctacgcaaagcctggacagaagattgctttcgtcggcgcaaccggagccggtaagacaacgattaccaatctgatcaaccgcttttatgatatcgacggaggaagcctgacctatgacgggattgacgtcagggatataggaaaggatgcgcttcgttcctcactgggaatcgttcttcaggatacgcacctgtttaccggtacgattgcagataatatccggtatggcaaactggatgccacgatggaggaagtggaagaggcggcaaagctggcaaatgcagattcctttatcggaaggctgccaaaggggtacgagacaatggttacatccgatggaagcaacctttcccaggggcagagacagcttctcgccatcgccagggcagccgtcgccgatccgcccgttctgattctcgatgaagcgaccagttcgattgacacgagaacggaacgtctcatcgaaaaggggatggaccggctgatggaagggaggacggtatttgtgatcgcccaccggctttccacggtgcgaaattccaacgccatcatggtactcgatcagggcgagattatagaaagaggcgatcatgaggatctgctggcccagaagggagtgtattaccggctttataatggaatgtttgagctggcatagaatagcatattacgaggaaacggcagaaaaattgccgtttcctataaataagtttatagctgatacaaaaggctatgaacttttttgttggtgacgaatggtgctacagcaattctaaattattccgtaaggaaattgacaggaagcactattgaatccggccgcggatgggtttataatatcaatatacgatatcgatacttgatattgagtgttgatatcaaaaatgccgaaacggtacgaaaggatgcttaattatggcgaaaagaacgctagaaatattgacggaatccatgttttacgtgctgatgtcattcatggggaaagagatgtgcggcatcgagattgccgaatttgtagagaggaagacaaagggaagggtcaggcttggccccggtacgctgtatacaattttaggtaagtttgaagaggaacattttatagaagaaattcaggttgaaggcaggaaaagaacctaccggatcacggaaaagggaatacaggcataccgcgatgaggtgacgcggctcagaatgtgtatcgctgatgcggaaagtgagggatatctatgaataaagagattatgaaacggctgccttttgcggagacgaatgtggagggaatcgagctgtggctggatcagatggccctggaaggcctcttcctgtgcgatacggcaggaacatcctggtatttcagggaaggagagcctgaagctatccggtacagacttgacaaagtgacggaaaagggggcaatgcccagtgtggagaagagggaaagctatcagaagaagggctggaagtatctgcttacacacaagacaatgtaccatatctttcaggcaaaggacccgcaggcagaagaactgcacatggacggacttgaggaaagccttaagcttaagcagttacagacaacattccggtcgaatctgatactctgcatagcatctgccgccgccgggtactggctttaccggatgaccggatatgtattttttcagtatcctctcttatccatcgtatcgccggattttaaccgtatctttctggccgtatggctggcaggctgtgtcttgggctgtatcttttcctataaagatgtcagggcgatgagacggtatatggcagagggaagaaaagcagggtatgaaaaggaactgacggggcggagcctgaaagagaagctgtcccggtatttttttccaatctggtttttcctgtatttcggcgcttccattttattccggccggagagtgtggagctggacggaaggatgaatttcgagggctgccggttctggaggcatttgaagacgggacggtagagacaagcgacggatggtttctcaatggtaagggagaccggtatatcgaatataaaaatctgctgctgaatgagaactatgaactccatgagacccggatggtgacgaaggaaggccaggccgaaagccgtgaaacctccatttccgcctactatttcgacagcaggatttcggctttgacagagccgttatttaaggaactggtaagaaaatatacgggagccgaaagcagtgatttggctcagtcagcgccttcaggtaccggtctggatcattgcgtgtatgtaaaagagggggagaaacaggtggtggcggcggcagaggggaaccggatcctggttgtggagtacgacggacagagcgatatgaaggagaaaaccgggataataaaggaaattctggaaaagggaaagtgaggtgtattctgtgaataatgaaagatataaatatcctcccatcgatgcattggacataaaggagatcgaagtctggctggaagagatggccggccgcggattgttcttgaaagaggccgggccgtatgcatggctttttgcggaagaagaaccgaaaaccgtgcggtaccggattgagcccgccgccgggaaaaaaggaaaactggatgccgatcggcaggcggactatgaagctatgggatggcattatgtggcaaaatataatacatattatcatatttttatggcggatcatccggagacggaggaacttcatacggatcggatagtggagagcttttctcttaaaatgctggaaaaaaagatcaggaaggatttagtttttctggctgtgctttgggcattcattgcagttgactcttttttctcgtccacccattttctgcggtatccggtcctctcgttcattgaactccggcctgcggtaatcctgtacagactgtttatggccgcctggttttttaaaacgcttttcctcgtcttaaaagtgcataaactcaggaaaatgctggcggaaggaataccggtgaaggtaaaaaaggtatccggaaaacggatcaggaagaaaagaatcggacatactctggaacggattggcattggctttctgatagccggtctggtactgtcattttttccggagcggatgggagaaccgcttgagcaggcaatgaaagccgggcgctttcttaccctggagcttctcgaagagagaggaggagaggaaggggcagtccgggcagcaaaggagacagaagaggagggggaaagcggaggcaccgtatggcagcgttttaatatactgacagccgggaattacgaattatatgagagggatgcggataagaagacggatgcgccggcctcgtcactgcatgtacagtatttcaggatgcgctttccctgtctgaccggagccttgttttcagaggtgcaaagaaaatatatcagcggcacattgacggcaggggatcctttgacggcggaaaatgctctgggagcctttaccatagtttacggcatcggggaggatgggacacaggctgcggcggccaggcaggaagatgatgtgatattgattgagtacagcggcccggagatgcttaaagaaaaaacagagttgataggtgagcttctggtttcggagaggaggcggagatattgaagaaagaacgtatacgcaggattccggtgaatgatatggatataaaggccgtggaaaggtggctgaacgacatggcggcccgtggccttttcctgagcagtacaggcagtagctggtggcgcttctatgaggatgagccggaagaggtgcgctaccggctggaaccggtcgaggagagggacgggaaactggatcacctgaagaatgaggattatgaaaaaatgggatggaagtatgtggcgagccacaaggactggtatcacatctatctggcccaatcggggacggcagaggaacttcatacagacccttttgtcaagagtatgctttttcagaaatatcaaaaatcactctggtcgattgcactcagtgatatgatcatcttaggcgtcctgataatgggcatttaccgtctgttcagcacagaggtatccggaccggctttattcctggcaagccctctgtttctgcagaatgcggtggtcgggacgctgcttcttatcatgccgcttcgaacggctgccgccatttataaggtttggaaattgagaaaagatctggaaaatggaaaaagcggggaagatggggcggaagcgctatgcaggatacgctacagctcccgggccggttatgcagtgacctttttgattgctgcttccatcctgactgtcttcacgggcgtcggaacaggaggcccgattgaacaggagataagggagcgccaactgccggtcctgcaggagctggagacaggcggggtgacggcagcacccggtgaaaatgatacgggtaatgttatctactttttcaatccttttttgaaagagcggtatgagataagacagcaggggtatgtggaaagagaggggaaaaactcggaaaacaaagacaagctttcatttttgaaggcagatttgtatgacgcgcgtttcacctggctctctgaggcactgtgccgtgaactggtggaggaacacctgtctcaccacggcggcggatacagggaacttgcgaaagaggggtatgacagcttttcactactggaagatgggaaaagccagattctggtggcaagacggggaaagaaggtgctggtactttattatcagggaagagaaaaactggaggataaagcaggggtactcgggacgattctggaatcgtgaataaacaggcaggcataaaaaggcggaaaactgccggaaatatacattctatatatataaaatgctatatttatgcatattaaaaatgaatatacactatatatacaatattttttaataaaaattcaaaaaaggtattgcataattattctcatagaggtataattatgccaatttcacagcagcccattgaacgttgctaaacacagcgcgaaacggtgtttttaaacttcaagtgggctgaggctgtttccggatagcgcacaggtgatgaataaaagtaaaaaagcaaacaaaatggaggagaactattatggaaaagaaatacaacaaaatcgtacttgcatattcaggaggacttgatacatccgttttaatcccgtggttaaaagagaattacggctgcgaggtggtggccgtatccgccgatgtgggccagggcgcggagcttatcggacttgaggagaaggcgcttaagacaggcgcttccaaactttacatagaagatttgaagaaagaatttgtggatgaatatattattcccacgatgaaggcgggagccgcatacgagcattacctgctgggaacctccttcgcgcgtcccattatagcaaaacggattgtagagattgcgaaaaaagaggggccgacgccatctgccatggctgtacaggaaaaggaaatgatcaggtccgtttcgagctggcaatcaaagcgtttgcgccttcgatggatgtaatcgcgccatggcggttctgggagcttaactcccgtgagaaagagatagaatatgccgagcagcgggacattccgttaaaaatcacaaaagagaccaactattcaaaagataaaaatctctggcatctctcccacgagggactggatctggaggatccggccaacgaagcgccgcttggcaaacccggatttttagagctttctgtttcaccggagcaggcgcctgatacaccagcctatgtggagattcattttgaaaaaggcattcctacctccgtcaacggcgaggagatggattgtgaaaaggtaatcgaagttctgaataaactgggcggagagaacggctgcggaatcctcgatctcgtagaaaaccgtcttgtgggcatgaagagccgcggagtttatgagactccgggcggaacgattctctataaagctcatgaaaaactggaagaaatcactttggacaaagagacacagcactacaaacagcagcttgccctgaaatttgccgacttagtatacaacgggcagtggtatacccctcttcgcaaagcgatgagcgcttttgtggattccacacaggagacggtgaccggcgatgtgaagttaaagctctataagggaaatattattccggcctccgtaacgtcgccgtactccctctattctgcagatatggctacctttgacgaggatgactgctatgaccaggccgattctgccggtttcatcaacctcttcggccttccaatcaaggtgcgtgcgttaaatgaccaggcactggctgcgaagacagggaaacattttccggaagtggagtaatcgtaacagttcatgctgtctgaactgttacaagtaatcagagtgctgaacatttttaatgataaggagcagtagagacaatggctaaattatgggcaggacgtttcgggaaagagacggatctggaagttaatgattttaattcctccatttcgtttgactgccgtctttataaagaagacatcaccggctccatggcccatgcggccatgctggggaagcagggaattatcgcggaggaagaggctgacaagataatagaaggcctgaaagggatattaaaagaaatagaggcaggaaaaattcagttttccgcggaatatgaagatatccatatggccatggaacagattttgacggaacggattggggttgcgggaaagcgtctccataccgcaaggtcccggaatgatcaggtagctcttgatatgcgcctttatgtgaaaaaggaaattggcgagataaagaaactggtcatcggcttcatggaggagctctgcgacagttcgaagaaaaatcttgatacggtgatgccgggctatacccatcttcagagggcgcagccggtgaccttcggccactatatgatggcttacgccaatatgatgaaacgcgatgtcatccggcttgacaactgccttgagggaatggacgacatgccgcttggctcgggtgccctggcgtccacaacttatccgattgaccgtgattttgtcagggagcagcttggatttgccagagtgacggataattccctggacggggtatccgacagggattactgtgtggagctttgttcggcgctctccatcctgatgatgcatctgtcacgtttttcggaggaaatcattgcatggtgttcctgggagttcaaatttgtggaactggatgatgcattttccaccggctcctccatcatgccgcagaagaagaacccggatgtctgtgaactggtgagaggaaagacagggcgcgtatacggttccctctttacgctgcttacagtgctgaagggaatcccgttagcttataataaagatatgcaggaagacaaagaagcagtatttgatgccatagatacggtaaaacagtgtctgagagtgctgacccgatgtttgccacgatggagctgtgccgggagaatatgaaaaaagcggcgcttaaaggatttatcaacgcgacggactgcgccgattatctgaccaaaaagggaatgcctttcagggacgcgtataaaacagtgggcagctggtagcggaatgtgtaaagcaggataaatccctgatggatctgacgcttgatgaataccgtgagcattccggactttttgatgaagacatttatgatgcaattgacctcaaaacctgcgtcaaaggccggaatgtaaccggaggcccgtccccggaggaagtgtcgaggcagattgccgtgattgagcggttcattgtaacggttcagacagcatgaggaaggaagaaccacagatggcgaaaccgaaagtttatatagacggaaaagaaggtacgaccggacttcagatttatgacaggctggccggacgaagcgatattgagcttctgctgattgaggaagaaaaaagaaaagatacacccgaacgcaaaaaactgattaatgaggcggatatcgtttttctctgtctgccggatgaggcagcgatccatgcggcagcgctggctgaaaacccggccacacggattatcgacgcctcaactgcccacagaacggcagaaggatgggcttatgggatgccggagctttcaaaggagcatcggaggctggtggagacgtcaaaacgggtagccaatcccggctgccatgcgaccggctttataacggcggtctatccgctggcagcgtcggggattctgtctcgcgactatccgctgaccgtgttttcactgaccggctattcaggcggaggcaagaagatgatagcggagtatgaggcagccgaaaagccgccgctttatgataccccgcggatctatggcctgaatctgaggcataagcacctccctgaaatgcagaaaatctgcagacttcagtatccgccggtattcatccccgtggtggacgattactataagggaatggcagtgacggtgatgctgcaaaacaggctgctaaatggaaagaaatcggcagaagagattcatcaggctctgaccttgcactatgcgggcaggaagctggtaaaagtccatccctttggctatgacaaaatgatagctgccggaaccatggccgggaaggacagtctggaactgattgtaaacggacacagtgatcagaccattatcacggctttgtttgataacctgggaaaaggcgcatcaggggcggcagtgcagaatatgaacctgatgcttggatttgaggagacgcagggactgaacctgtgatacacgaaaacacctcgcgggacgttaccgtatgagcagtaactgtgacattgcaacattatgaaaaaggaggaactttggagatgaaaatcatagatggcggagtttgtgctgcaaagggctttaaagcgggtgcaatacgctgcggaatcagaaaatcccagacaaagaaagacctggcaatgattctttcggactgtgaatgcagcgcggctgccgtatatacgacaaacagggtgaaagcggccccgatacttttaacgatggaaaacctttcaaacggaaaggccagggcggtgatcgtcaattccggcaatgccaacgcctgcgccccctttgggattgagaatgccagaagagaggcaatggctgcggcccgtgcgctccatgtcgcgatggaggatgtggttgtggcgtctaccggcgtaattggccagactctcagcgtggagtgcatcgaagaacatgccggaagcatggaaatgaaatacggaaattctatggctgccgcagaggccattatgacaaccgacacaaaagtaaaaacgattgcggtggaatttgaggcggacggtaagacctgccatatcggaggaatctgcaaaggttccggaatgattcatcccaatatgggaaccatgctgtcctttatcacgacggactgcgccatttcatcggaaatgcttgataaagcgcttaaagcggatgtaaaaaagacgttcaaccgtgtgacggtggatggcgatacgtccacaaatgatatgtgctgtatcctggcaaacggcatggcgggaaacctcccggtggagcaggaagggccggattatgacgcattttgtgcggcgctgcatatggtgacggaagatttggcccgcaagatagcggcagacggagagggagccagcaagctgatgacctgtacggtatcaggcgcactggacgaggatacagccgagcagctctgcaaatctatctgttcctcatcccttgtcaaggccgcaatctttggttccgacgccaactggggccgcgtgctttgtgcaatgggctattcaggcgcagcattcaatacggaagaggtgacagtggaatttgcctctaaagcaggtacggtcacggtctgtgagaaagggcgcggcctggatttcaatgaggagctggcgaaagagatattagatcaggaagaggttgaaattaacgtaaccctgcaggaaggcagcggcaatgtcacgtgctggggctgcgacctgacttatgactatgtgaaaataaacggagattatcggacatgatgaatttaacccctgagacgagggccggaatactggtggaagcgctgccgtatatccaggaatatgccggccagattatcgtggtaaagtacggcggcaatgcaatggtgagcgaagtgctcaaagaagcggtcattcaggacattgttcttctgaatctggtaggcatcaaggtcgtccttgtgcatggcggcggcccggagatatcggaaatgctgaaaaaaatcggcaaagaatcgacctttgtcaaaggtctgcgctatacggacgaggagacgatggatatcgtccagatgattctctgcggcaaagtaaataaaaatcttgtctcccttctggagaaagcaggcggcaggggcgtcggtctcggcgggatggacggtggcctcttcaaggctgtcaggctcagggatccggatggaacggattatgggtacgtcggcgagattaccgaggtaaatgaaaaactggtgctggatatgctggaggagggattcatcccggtggtatcctccgtggcggccggtgtcgatgaggagacaaattataatattaacgcagatacggcggctgagaagctggcggtggctttaaaggcaaagaaactgattctcttaaccgacgtgcgaggactgatgaaggtaccgggggacgacagcactctgattccaaaactgaaggtatcggaggttccggctctcgttaaatcgggcatcatctcgggcggcatgattccgaaagtggactgctgtgtggaggcggtacgccagggggttgagagggccaatatacaggacggccgcgttccccactctattctgattgagctgctcagcaaggacggcgtgggaacgatgttctcataagcaggaggaaaatatgacatatcaggaattgaaagacgaagaacaactttatttaatgcatacatatggccgctttccggctgctctcgaccatgggaagggagccactctctgggatatcgacgggaaaaagtatattgatctgacgtcgggaatcggagtaagcagcctgggccacgacaacgaggcccttgtatcggcgctgaatgaacaggcccataagctgttgcatgcatccaatctgtatctgacggagccgatggtgcaggtggcaaaagagcttgtaacctcctgcggcatgggaaaaatatttttctccaactccggcgcggaggccaatgaagggatgattaagctggcccggaaatattcctatgacaaatatggggaaggcagaaataagatcatcacgttaaagcagtcgttccacggccgtaccgtcaccacgcttaaagcaaccggacaggagaaattccatcagtatttctatccattcaccgaagggtttgattatgctgcggccaatgatattgaagagcttaaagataaggccgatgattctgtctgtgccgtgatgatagaactgatccagggtgagggcggcgtcctgccgctggataaagaatatgtgcagcaggcggctgagttttgcagagcgaaggacattcttttcctgatagacgaggttcagacaggaatcggccgtaccggcagtctgttctgctatgagcagtacggagtaaagccggatgtcgtcagtatggctaagggccttggcggcggcgtaccggtcggcgcggttatggcatcagagatatgcgcggatgtgctgggggcaggcactcacggaacgacattcggcggcaatccattctgctgcgcagcggcccgcaccgtgctgtcggttgtcaataaaccggagttcttaaaagaagtgcagcgaaagggcgaatatttgaaaaacgccattctggcaatcggctccgacaagattaaaacggtcagaggcatgggactgatgctgggaatcgtcgtagataaagaaagccgtacaggaatggtcaaccgtttgcttgaaaagggcgtcctggcgcttactgcaggggaagagacaatccgtctccttccgcctctggttatcagctatgaagagatggacagcgccgttgccgttatgaaggaggttttctgaaaatgaagcatttattaaaactgctggactgcaaacaagaggaaatcacagcgattctggatctggcggatcagctcaaatatgagagaaagcataacattacacacaggcttctggagggaaaatcgattggcctgattttccagaaatcctccaccagaacaagggtttcatttgaaacaggaattttccagctgggcggccaggctctgtttttatcgtcaagggatcttcagattggccgcggcgaaccggttcaggatacggcccgggttctctcgcggtatctggacggaatcatgatacggacctatgagcagaaggaagtggaggaccttgccagatacggccggatcccgattataaacggtctgaccgatttctgtcatccatgccaggtactggcggatttgatgacaatcagggaaaaatacggagttctaaacggcctgaagctgtgctatatcggtgatggaaataacatggccaactctctgattgtgggcggactgaagatggatatgaatgtgtcggttgcgacaccggaaggctaccggccggataaaacagttcttaactttgcttccgaatacggtgaagcattcacattgacggatgacccaatgaaggcggcggaaaatgccgatatcgtggtaacggacacctgggcgtccatgggacaggaagaggagaaaacagtccgtatgaaggccttccaggggtatcagttaaatgacaagctgatggccgccgcgaaacccggagccatggtgcagcactgtctgcccgcataccggggccaggaaatcacggataagctctttgaagagcatgcggatgagatatttgaagaggcggagaaccggctgcatgcgcagaaggcggttatggttacgttgatgaaataaaggatagaaaattttgataaattaactttataaagagaaaaagtgtcgcttaactaaatattaagcgacagtccggtgtgtattatttaaagtaatttttaataaaaattggatatttatagataactaaagaaaaaaataagaatttattaggatttattgccatttcttttcattccaggctgttgaccagactttgaaagaatgctataatttacgagaactcaaaataaatgcaaaaagtgtcgcttaatatttagttaaacgacagttcggaggcgctgatggaacagtggtatgcattatctgcggtgtccggcaaagagcaggaggcaatagaactgctggagcggagaataagccgcgagaattggtgtgaatggcgaatcctgaaaaaggtaaaggtatttcgctcaggaggaattctccatcttgtagaagatgtaatgttccctgggtatattttggtgagaacagattgtcccgaaaagctggttaaagaattgcagagagcaaaagattttccgcagccattgataaggtctgggaatgaaaggattgctaaggaaacacagatgatcccattggaagcggcggatctgatgtttttaaaagcggtctgtggagataacttaaagaggccaatgggaattactcaaattaagttaagtgatgaccggaggattgagaaagcggatggaattttatcaggttatttaaatcagattgtgaagctgaacctccataagcggtttgccattgtggaggtggagttgtttaacagaaaacaggaaatactgttcgggctgaaactggaacatgatctggcagtgtaagcagtgaataaatgattgaaaagtacattttgaagaagttctgtggtttacgccatggttcgggcgaaagtggattatagctgagttggacaagcgtttttgtccatactgccggggagaaattcccggatggcgaagcttactctgaatggagaaaagatttatgtggtatgtaatacagacggttaccggtaaagaacaggaactcatgaaagcaattgagaatgttcttgtcggaaataaaagagaagaaacatataaaagatgttttaccctggaacgggaatgcatctggagaatcgaaggacagtttcggattcatattgaaccgttatttccgtcttatgtgtttgcagagaccgataatccggatgcattttttattgccctgaaacaggtgcccaagctggcaaagctgctgggagcggaaggaaacttctggagtattggcgcatatgaggaacaatttcttcacaatatgattgagactgcccgtaaagaaaccaacttaaatgcatcagagggcagcagggcagagcggtatatcgttcagcggtccctggttcatgtggatgcaaacggacagatcgtttcggccgaaggagcactgagagattattggagtcagattgtaaaacaaagacttagaaaacgcagtgtaattatcgaaatcccttttttaggagagacaaggcggattcagttgggtatccgcctggatgaggacaaatttcactgacaagatttacgaaaaaggagggaaggggttggtatgccaggcctctttaacagttatgaaaatggaaaagaaaattaaaaaaccagaaaaaagaattcagtttgaaatctgtgtacgctgccataagcagctgcaaattccggttgatatagaaatagattaccgttcctgttacgttgagggagcagggcagctttgttatgactgctatcatgaaatttataaatagagaaggaatgccgaaaattataagctggaaaaagggagttttaccaatgaaaaatcaggaacagtataagcggctcatacgggcagctttttgttttacattgctgtttgtccatgcattgctattttggtgcgtatggcgtggctattacagtctcttaatggagacgcaatattggaaaaaagggcattggatgatacttgctttttacctgttttggagttttattctgcctcgcgtttacggcggctggaaggtagggtatctgcgcatatttaatgtcatctattcccagattttaggaattatcatgacaaatgttttgatgtattgtctcgtgacattgcttacaaagcattttgaaaatgcaattccgctgattattatgactgtttgccagttccttctgatttcaatctggggagttgtaagtacaagactttacagactggcttatccgccccgcaaggtgctgcttgtctatggagagcatccggctctgggattgatgaaaaagattggaagccggacggatcggtttgagattggtgagatggtacatataccgaatggctcaggtgaattgaagacagatgaaacagagtggggcgagataagagaaatagagaaaaaaatagcactttatgatggggtggtaatttgtgacattccaagtcatgagcgaaaccagattttgaaatattgttatggaaaaggggtccgctgttatactacgcccaaaatatcagatttaattataagaagtgccgaaagccagcatatgtttgatacgccgctattactttcacgcaataacgggctgacgatagagcagaggtttgttaaacgaatggtggatattctgttttctgcaatagctctgattcctgctttgccgcttatggcaattgtggcagtatttattaagtcggaggattggggcagtattatatataagcaaaaacgtctgactataaacggaaaaacattttatgtttataaatttagaagtatgaaggaagatgcagagaaagatggtgttgcaaggctggcaggagaaaatgatacccgtattacaagaacgggacgcataatccgcgctgtgcgttttgatgaattaccgcagctatttaatattttgaagggggatatgagtattgtcgggcctagaccggagcgaccagaaatcgcgtcggaatatgaaaaagaaataccggaatttaattatcggttgaaagtaaaggcaggacttaccggttatgcacaggtgtatggaaagtataatacaacagcttacgataagcttaaattagatttgatgtatgtccagaattatagcttaaagctggattttgaaattatgatgaaaaccgtacagattttgtttatgaaagagagtacggaaggggtggagtctggtcaggaaattgcattaagaaagacgaaggaggcagaaaaaattgaaagaggatgacttaatatcaataattatgcctgtatataatgcagaaaagtttttgcgagactccattaaatcggttcagaatcaatcgtatcaagcgtgggaactgcttttaattgatgatgcttcggtggatggctgtgaatcaatcatctataattgtatgagaagcgataaacgtattaaatatgttaaattagaaaaaaattatggtgcagcctatgctagaaacatgggaattcaaatggctgagggaaaatatattgcatttttagacagtgatgacttgtggtatcctcagaaactggaagtgcaatataaatttatgaaaaacaataattttgcgtttacctgcactttttatgagtggattgatgagcgcggagttccgttaggaaaagaaattaaagcgccactaagagctaattataaaagagtgctattagataatccaattggaacactgacagctatgtatagtgtggaaaaattaggaaagatttatggaccgcttatccgaaaaagaaacgattatgcattatggctggaaattttgcgtcggacagagtatgtacattgtttaaatgaaaggttggcttattacagaattaggaaagattccctttccaggaataagctgtcgttgattaaatatcaatgggagctttacagaaaatgtgaaggtttatccttagtagcctcacttttccatattttatatgtaatatgtatcaagatttttggggtcaagtctgaaaaataataattatagaaaagaaaatagttttgggagacaagatataaatgaaaattacaatatcaggaacaggttatgtaggtttagtaaccgctgtgtgtatggcagaaaaaggtcattttgttacatgtatggatgttgacgaaaaaaaaattggaatgttaaaggcaggaaaatctccaatttatgaagatggatttgaggagttgatgaataagaatagaaataatattacatatacctgtgatgccgctttggcctataaaaatgcagaagtgattttcataggagttggaacgccggaacgaaaagatggttcggccaatctttcttacatatatagcgtaattaaacaaatcgccgaatttgttgagaatgattgcacaatagttataaaatcaacagtaccaatcggaacaaacgataaggttgaaaaaatattaaatgaaacgaagaaacacaaggttaagctttatgtggtgtcgaatccggagtttcttgctcagggaacagcaatacgggatacgcttcatgcttccagaatagttattggagtagaggataaagaagcggaaagtatcatgcgccaggtatatgaaaattttgatgcgccaaaattgataatgaacagacgcagtgctgagatggtgaaatatgcatccaatgattttctagcgctaaaaatatcatatataaacgaaattgctaatttgtgtgaagagataggcgctgatattttagatgtaacaaagggtatgggttacgatgaacgtattgggaagcagtttttaaatgcagggattggatatggaggttcttgcttccctaaagatacaaaagcgcttcactggatatcgaacatgtatgacagggaattgaaaacaataaaagctgctatagaagtaaatgaacaacagaagctaagattaataaaaaaagcgagaaaatattatgatagctttgaagggttaacaatagcagtgttgggattaacatttaaacctggcacagatgatctgcgcgaagcgccctcattagttaatatttctatatttttagaagaaagagccagagttaaggcatgggatccgataggagttccaaattacaggaaaatttatcctacagagatagagtattgcgaaagtatagaagaaacaattcgagatgctgatatttgctttgtttttacagagtggaatgaagtcagaaacttacaagtcagacgttttaaggaattaatgaaaacacctattgtgcttgacggtagaaattgtattgactgtaaaactctatatcccggactaataatagagagaataggatgcagatagcacaagaggagtattctaatgaaaatagaagtattagttgcggcaatggggcagagtgattgtcagttaattgcagatatgaatatacagacagatgcattaatagggaatcaatgtgataagaatgagatacgggaatttcaaattgatgataagaaaattatatattattcctttaatgaacgaggtgtcggtcttaatagaaataatacactgttacgcaccagggctgatatctgtattttggccgatgatgatatgcgctttgttgagaattatgaaaaaattgtaagagaagcatttctgaaaaacccgtccgcagatgttattatttttaatttacttgagaagactcccggacgcttccttataactaaaaaaatgagaattacctatttcaattatatgcgttttggagcggccagaatagcaattaaaagaaagagtataagtaaaaataatattttgtttcatcaggaatttggagggggcacattacattgtcatggtgaagatactatttttttacgtgattgtttaaaagccggattaaaagtaattgctataccagaatatatagctgaactaaatgataccaggaaatcgagttggttttccggatataatagaaaatacttttttgatcaaggatgcctgtattacagcttgtccaaaagatggtgcaaacttctggctttacaggattgtatgcgccattacaaaaaatatcaggaatctatgcatatttttgaggtatggaaaacaatgttatgtgggatagaagaattttctaaagctgaggctttagaagagtagaatgataagtttttaagctgttttaatttaggaggaggcatgctgcatactattgtttttttctacatatttgattttaaattaattaaaggaaatcccttgtcggcttcggctattattactggaataatattaggattagtattgctgtttaataaggaatatcagaaaaaatacagagcattatttagaaatcactatcactggaaaattttaatgtgttggtttttaataaacttattttctgttgctgtaacaatagcgcaccaacaatatgatttttcattttgtaaagttttggtacaccaaattattataatcgaagttggcattttacttatagcttttattagaatgaaaaatcaacaggagaaacttttagacattgtaattgatatatttataattcaatcactaatcattattttatcaattatatcatcgccatttcgagagcttactaatatttttagagaggagcatgtaatagaaaaggcatatcaatcatatgccaatgcaagggggatggctatatcaggaacagccttttttggattagctgtttcatacgggactatttttatactaatttcttatcattgggatgaatggaaatataagtccctttttgtgagaggtttgtgtttggcgatattatgtgtgggagcaatatcagcggggagaacttctttaatcggagtaatagtttccattcttttctgtgttgcagtatggcatcctaaaaggaaacgaaccactaagaaacagaaggttacagggctggtttttcttatttccgtactgatagtggtagctttatttatgagcagtaatcaacagaacaataaagctgtggaattgttgtacaaatattcctttgaaatgattaataattttttagaagggaatggtctgtcatctacttctgtcaatacgttaaagtctatgtacgtatcattatcaccaatgcaacttatagtcggagatggcaggtatacagtgcaaggtttatattatatgaatacagatgttggatatttaagaggaattttatattttggaatactcggactcttatttctgatatattaccaatggcagctccttaaagtggattcccagcatagaaaaacgcaattgtttcttttttcaattttttttctggtgcttatttatgagttaaaaggagaagttgctggagttttaataatgtttcaagctctaattttgttaattcgtgaagcagttcaatacaaagagagcagcacaatacaaaataactagaatgaatgaggaaaaaaatggagaatgatgtattagtaagtgttgtttgcctgacttataatcaagaaaaatatatacgaagggcaatagaaagttttttatctcaaagaacaaattttaagtatgaaatacttataaatgacgatgcgtcaacagatgaaacagcaaatataatacgggaatatgaaatgaaatatccagattatataaaacctacatatcaaagtgagaatcaatacacgaaaggaattaaaatagcggcttcttttctatacccacaggcaaaaggaaaatatattgcgctttgtgaaggtgatgatttttggacagaccaattaaagctgcaaaaacaggttgattttttagaaaagaatgaaacatgctctttgtgtgtacatggtgcagttgaagttgatgctgagacgttaatagcgcgaggaaaggtgtgtccatcaaagaaaaatcggtattttactacagaagaaataatcataggtgatggatgtatatttgcaacaaacagtatggtttttcggaagcagtacagcgatacattgccgaagttttattacgaggctccggttggtgattatcctttaatgatctatttatcgttatgcggagcggtgtattatatgaaggataatatgtcggcttacaggagagaggcagaagggtcatggacaaaaaaactggaaaaaagtgatgcaattacaaaaataaatgtattgacagggatagaaaaaatgcttgctgatgtggatatttatacaaataagcagtttacatctgcaataaatgaagttatcactaaaaagagaatcgtacttttttataaaatgcgttgtctttttaaactgaaggaaccagaatatatacaatggtacaatgaactgccatggtggtggaaatgtgtgatacactttatgaattgttttcccaagcttacttctcgtactttgaaagtaagaaggtatattaaaaatggataatcaaacagtaattaagaatagcaagtcaaatataatagaaaatctttcatggaagcttcttgaacgttttggtgttcagggagttcaatttattttacaaatcattctggcgcgtttgttaagtccggaacattacggctatctctcattaatgctgatatttataacgctcgcaaatgtttttatacaaaatgggtttaatacagcattaatacaaaataaagaattaacagatgaggactattcatctgttttttggattacactgatagtgtctgcagtattatatggggggttatatgcagtagcacctacaattggccggttttatggaatgaccaatcttgcaggcccttttagagtgctggcactggtactttttccaggaacatttaactcaattcaattagcgaaagtaagcagagaattaaatttcaaaaaagtatttttcagcaacataggagcaatagtgatatctggtttggtggggattatattagcttttataggagccggagtctgggccttggtaatacaatatctattgaatgtttcagcagcatgcatcatcatgagggttaccgtaaaatggcacctacaattcgtgtgtgatttacagagagtgagaatactgtttgcctatggctggaaattattagtttccagccttcttgatacactttaccaagatttgagcagtttagttatagggaaaaaatataatacgggaattctgggatattataatcgtggaaaacaatttccgcagtttattatcagtgcaataaatggggcaattcaaagtgttatgcttcctgttatgtcggcaaagcaagatgagcgaagccaggtaaaagcgcttaccagaaattctattatgctaagttcctatattatctttcctctgatggccggcttggctggtgtggcttcaccgttggtgagaatattgcttacagataaatggcttccatgtgttccgtttcttcaaatattttgcttttctctttctttttggccagtgcataccagtaatcttcaggcgattaatgccatggggaggagcgacatatttttaaaactcgaaattataaaaaaagtccttggaatcttagctttaataattacagttatgtgtttttcgtcacccatagcaattgcgatgacaggagtatttacaggggtgataagttgctttattaatgcatatcccaacaaacgattgataaattattcttataaagaacaggtggaagatatattgccatctttttttatatccattgctatgtttatttgtattagtctgttagcaaatctgaaggttgggattgtgtacttacttattattcaagtattagcaggcataatagtttaccttacgttgtcattaattttcaagttgcgtccatttataaaaatattgaatattattctaaaaagggagaaagttttatgaaaaaaattacagttacacgttcctctatgccgaagtatgaagaatatatagaggctataaaacctctttgggattcaagatggttgactaatatgggggaatttcatcaaaaacttgaaaaagaattagctgaatatttaaggacttcctatatttctttgttttccaatggacatcttgcattagaattggctatacaggcgatgaatttaaaaggggaagttatcacctcaccgtttacatttgcttccaccacacatgcaattgtaagaaatggccttacccctgttttctgtgatattaccccggatacatatacaatagatgtggataaaattgaagaattgatcacagataagacatgtgcgattgttccagtgcatgtatatggaaatatttgtgatgtagaacgcattcaacagattgctgaaaaacatgatttgcaagtaatttatgatgcggcacatgcgtttggcgttgaatacagaggaaagggaattgcttcctttggagatgcatcaatgtttagttttcatgctacaaaagtttttcatacaattgaagggggagctgtctgctattcttcagaggcattgggggaaggttatatcaactgaaaaatttcggcattaaaaacgaggaagaggtagatgctgttggttccaatgctaaaatgaatgaattccaggctattatgggattgtgtaatcttactcatttaaaggaagaaatagggaagagagagtgtgtgacaaagaaatataaggaatgtttggcgggaatagagggtattacgcttccttcggtgcaaaaagaagtaaagccgaattatgcatattttcctatcttaattgacgctgaagttttttcaaatacaagagatgatgtatatgaaaaattgaaaagcaataatatatttgcccgtaaatatttttatcctctgacaaattccttttcctgctatagaggcagatatgatagccaaagtacaccggttgcatcaaaaatctcaagacaaattttgacgcttccgctttatgcggatttgaagatggaagaggtggaaagaatctgtggcataatcagaaatatgaagtaacaattgaaataggaatttaattttagatagagagggtaggataaatgaaagtaggagtaatgcagccatattttcttccatatataggatattggcagttaataaatgctgtagataaatatgtaatttatgatgatgtaaactatataaaacgaggctggattaaccgtaacaggattttgataaatggagatccctgtttttttaatgttccaatattaaaagcgagtcaaaacaaactaattaaccaaatacagattaataaagaccctatagtaaatgaaaagcatttgaaaaaaattcgagaagcatataaaaaggctcctttttataatgaaatttatcctttagcagaaagaatatttagttgcaatgagactaatctggctaattatataaaaaattccatacttattatcaatgattaccttaatataaatactgaattaattgtttcttcttcaattaagaaagataatgtcttaaagggacaagataaaattttagaaatttgtaacttattaggagctacagaatatataaatgcaattggcggaaaagaactctattcttttagtgcatttaaaacaaataacattgtgttaaaatttttacatacaggttccattgaatacaaacagtttaaaaatcgttttcagccaaatctatctattttggatgtgttaatgtttaattctctggagcagataaaagaatttatgaataactataccttaattggcgaagaaggagaagtatgaaatttgctttttatgtttcgggcgcatcgacacgactattgcgctttttagatcaggcaacagataaagatattaaacaaataaagattgttatgtcagatgatttattaaaagaagaattgaaaataaagcttgaggaaaataaaataaaatatattgaaattccatataagagtattaagggagtaaataatagccagaagagcctggaattatcgaatcagcttctaagagaacttgataaatgggaaatcgattattgcttttcatttggaattcatatcttatcaggaaaattacttgaaaaatatgagatgagaattatcaactttcatccgggacttcttccaatgtttcctggattaaatgcgatagatcaggcagttctccatggaaatacccttttagttggaaatacggcacattttattaacaaagatgttgatgctgggcctgttattatgcaaagtattattcctttggaagcattttatgagaatggaaataattatgattgtatactggatttacagatagagatgctaaatgacttaatctatcttatgtcaagtaacagaattacattagtagatggaagagtaaaaattatagaggctgactatcaaaagggggctatttttccccactatgatagatcaaggcgaaaggaatgataattgaaatgagagtatctcatcgcataaaagtaacttttttatcaagctttacaataggaatgctgacccatttttttgcattagcaaatgagttgctattttgaaataatgtatgacgaagtaaagggcaggcctaagtatataatatcagaggtgtttcagaaaaagagatagatattaatttatatggaatgatatgcaagaaagtaacttttagaacgattaatttttatatattaggtttaaatatagggcagcttatttcgagctgccctatattttatctttttatcacattagcacagataaagttaaggaatactttagctaaaaagaataatatggtaaactagacttatactaataaaactctgatgagtgatgtgaggcaatatgattgatacaattttagaactgctaagctacatagacgctccggaaatgaaaaaatttatccttatacttctgctgtaccttttggcggtaatcggtgcagggaaactgtttcattcctacctggtaattaaatatataagaaactcattcattgctgtgttgggagccgtcatagtcattacggccgacattttatttatagaaccgtacaccggtaaatattgggcatttttatggggagccggtgcagtctgcctgctttcagcttctattttattcataagatacaagcattactgccatattctcaaagtgatgaaaaaaacagaatcagaggatattatttctgcatggaagaaattaaatgaaattccgctttcgaacctgactcccggaataaagaagaaatatttggagcgctgcctcttcggcttgttacttttgggagatctggaaaaagcggaaagatatctttcacagttgggggtctcggacggtccgttgttttactttttccacggttttaagcaaatgtctgcaggtgacatagtccgggcgggtgagtcaatgatgaaggcggaaaaatgctgtcagcaaaatacgcctccccaactgtacattcagattctcaataaccggggagtgctttacgtatgccagggaaattatcaggaggcagattactacttcaaacaggcgattgcggcggccggacaaaacaagaaaatgaatatggagattctggaaccggtttattataattattgttttaatttgtgcagaattcgcgaggacatgaaacggggagactggaaaaaaatattggatgaataccgtgatttactggatatggggaaggcgaaagcttttatttccgtatgcaatattgaattggagctgctccgccagacagaggaaaatacacaggagactgaaaaatggatccaggaacaatttttacagacactgaagtatggactaacggaacaggaaagatgtgtttacgagggcagtatggcaaggatcgtctgctcgatgcgttttaatccaaccaactgtcttgaagcgcttgagaaagacagagagaagctctcaggacttcccatgccggcgcgataccgtacatggaaggagattgatttgctgtttcgtgatttgtacgatgacagacttttgggacagtatcatgatttggatagggcggcggaaaactatatggcgtttcaggcggaaaaagagatccagaactatatcgactccctaccggcagaagccgtatatgaacggtgccattaccgcaaagaattggccgggatgaaaagaatgcatattgaggaataccggtttgagaaggtgaaacaaatgctggaggatattacggacgtttatgaggaaaaccatttggaaatcgatgcgcttgatacgcgtatggctatcctggacgaaggtacgtttgccttaaacctgacagaacatcataagcccatctatgctgcagagatgcagaatcagatgcagcttgtagaagctaaattagagaaaatgatccagcacccaaaaacagcagaatatgcgctccgcctttgtttctactgctgtcatctggacgaatatcagaaatgcctcatgtattttaaacggtttgaggaagccggactttccctgagccactttgctccatggctgagaaactattactcattttgttctgtggttatccggattttaaaatttgcagatgcgattgaacaagtccggagagaacggtcaaaactggaaatatacgaagaggctgtccagaactggtttgagcagtttccgttttccgatgggttccatgcatcgctgctgctggggcgttttatgggatgtaaaacgatacgggttaaatataaaatctggtatcaggacaatgaaatcgacagagaggggagacgtgattttctggattcaaagaatgaagacagacttaaagcccatgtttggtactgtgaagagagcatccacatggaggccgatttgacgtatcgccagttttcttcggatgaaaagtcggattttattttattttcagagactcatcatccttttgaggtgaatgaatcctgtcatctgttaaaacaggccaggatgagccggatgaattttctggggatacaggaaaaatatatagagataaaaaatcttccaaaagacgttcaggaattattagatatcgtatataatattattatgagcaaaataaccgattaatgacagtacagtgaaagagagggtggtgtgatgaaaatcaggagaacaattcttgcgttgctgctctatgcggggtttctgtttttctctgtttacgtggctttggggaatgacatttgggacagactgcaaaagtggaggaaacgggggaccaattagctgattgaacagaaccccagttacaacttcacaacagcagaagaattcaggcataattccacgcggattgcaaatactgataaatcagagtaaatatggatatatctgatttccatccacatatgcaactgctgatcaatcatccggaaggagtaatctgctgatatgactgaaaagaagctgaaaaaatccaaaacagacacagaaccccagtacatgaaagatagtgcaaagggcacagagataaccccacaaactaatttaaaccctaactgtccctgcaagagagactgtatccgccacgggaactgtaacgagtgcagagcggtacacgaagcagaaggtaagtatcctacctgctgccagaggattgcggacagaaagaagagacaaaagaaaggaagcgcatagcatggatttcggacaagccgcagaactggttgaagcgttaaggtcgaaagacgaaacaaaggcttatcaatgttttaagttactggagaaggaatcatccgatacggatcatgtataccccttctttgacctttttgcagatatgatagaagatgaaaattcctatgtcagaacgagggggcttctgctgattgccgccaatgcccgttgggacacggagaataagattgatgagctgatagacagctatctgaagcatattgaggatgttaagcctatcacatcgagacagtgtatcaaagccctgccgtcaattgtcaagtataagcctgacctttatgattgtatttgcactgcgctggaacaggccaatccgggcatttacagggacagtatgagctctctggtaatgagagatattgccgaggcgctggcgtctatccggagagaggggcgatgagatggttcttaaaacagacaggctgatactgagaaacatggggcaggaggattacgaagcgctttgccggatattaaaggacaatgatgtgatgtatgcctacgaaggagctttcagcgatagagaagtacaggaatggctggacaggcagacagagaggtatcatcaatatggattcggactctgggccgttactttgaaggacagcggccgtatgataggccaatgcggccttacgatgcaggattacagggaaaaacaggtgcttgaagtcggctatctctttgaaaaagcatactggcatcatgggtatgccgttgaagctgccgccgcatgccgggactacgcctttaatcagctagatgcagaagaagtctattccatcatcagggacagcaataccgcttcccagaaggtggcacagagaaacggtatgaggtacagggatacgattgttaagcactataaaggtgttacgatgccgcatcatgtatattccgtaaagcggaaaacagagtcgatcagcctgtgcggagttgactgcacggattgtgagtatttcgggacagaggaggacaggtgtgccggctgtgatgagatacagggcaagccgttctggcttaaatatacaggggaagaaatctgcaggatttatgaatgctgtacatataaaaagaaactgccccattgcggaaaatgccgccggctgccgtgtcctctctatgaaagcagcgatccgaccaaatcggcagaggagaatgaggcaatctttctcagacagatggaacagcttaagaacaggccatgaactataaaacgatgacagagaatagggatccggcggttggccggatcctgtttgcgcgtctgtcaatgaatcattattggaacaggccgtatctcacagataaacggatttatggtttctgctaaaatagtaccagcctgtaaaaagttgtaaaagcacttaagtctcccggagcgcataagatagattaacgtagctttgaggtggctttctttgaaaacatttccaaaaccattgacggccagtgaagaacgtgagtatctaaaacgctgcaaagagggagacgaagaagccaaggccgttttgattgaacgtaacttaaggctggtggcccatgtcataaaaaagtatcaatatactgattatgagatggaagaccttctgtcggttgggacaatcgggctgatcaaagccgtgaatacgtttaagatggaccgcggctccagactggctacttacgcagcgaaatgtgtggaaaacgagattctgatgctgtttcgcgccggtaaaaagcattccaaagatgtctccttatatgaccccataggagttgataaggatggagagaccgttaacctgatcgatgtgatcgaagcggatgataaagctgccctggagacgattatattggagcaggatgtctctgaactctatgatgcctatcggaaatgtctgaaaaacacggagcaggaggtactgagcatgcgttacggactctttggggagcaggaacgcactcagagagagatagccggtaaaatgggaatctcacgttcttatgtcagccgtattgagaagaaggccctggaaaaactgaggctggaatttgagaagaatgggtgaaccggaaattttgaatgtcggggacgatttgcgtctgtcagcaaaccggtttctgcaaaatatgcagaaggccggttgccgaaccggccgcctggaaaaagacagcataaattcgataatttatcgcaatatttctgattgtattataaatatcctccgtatataatgaaagctgagcttgaagttttgattgatggcagtgaaaagtttgcggaacgcgtttttcattgcgagaaggaggatgttgattatggcaattttagttacaggcggtgcaggctacataggaagccatacgtgtgtagaacttctgaacgcaggatatgaggttgtagtggtggataatctcagtaattccagcgaggaatccttaagacgtgtagaaaaaatcacagggaaacaggtgaaattctatgaggctgatttattggataagcctgccatagaggctgtattcgataaggagaacattgattccgtgattcattttgcaggactgaaggcggtgggtgagtctgttcaaaagccactggaatattatcataataacattaccggaacgctgctcctctgcgatgttatgaggaaccatggcgttaagaatatcgtattcagttcctcggctactgtttacggagatccggcattcgtaccgattacggaagagtgtccgaagggaaagataacgaacccatacggacagacgaagagcatgcttgagcagattctgacggatctgcatgtggccgatccggaatggaacgttgttctgctgcgctatttcaatccaatcggagctcataagagcggtttaatcggcgaggatccaaaggggattccgaacaaccttgtcccgtatattgcgcaggtcgcagtaggcaagctgaaatgcctcggagtttttggggacgactatcctacacccgacggtaccggagtgcgtgactatatccatgtagtggatttagcggtaggccatgtcaaagccctgaagaagattgaagagaaggcaggggttaccatctacaatctgggaacagggaacggctacagtgtccttgacgtggtaaaagcttatgcaaaagccagcggcagagagattgcttatgagattaagccgagacgcgccggggatatcgcaacctgctatgcagacgcaactaaggcgaaagaggaacttggctgggaggcagagcgcggcatagaggaaatgtgcgaagactcctggagatggcagtcgatgaatccggacggttacagaaactgagacagaaaccggcaaggcaataaggaaggcaaagcggcttttaggcgtgcgccggattagcagataactgaaaataaatttatttactgtccggccttagccggacagtatttttatttgaagacggtggtctgtacgcagagcgtgcaggctatcgtttaacaggaaagttctcctgttaaataaaaaccgctccgcggaggatcgcaactctaaagagggcttgttcactaagctcgttacactcgctaagtgagccaatgcctgcgacggcagggaataatgtcgctgaagcgacccgccgcagacagaaaaaggctcccatacgttcataaataataaatagatttgccgaaaatccggattttgaagctctttgcggtcattgcagaatctgcggttgtaattcgttgataaagttgttataattattggctgaactataaaaatagttcggaaaaggatagggaggatttttgaggtgaaaaaattgactgctttctgcgggagcctggcactgatgctgtttttcagtccgatgacggctctggcagcagaacatgtggccggcagtgagaaaacagccgtaccaatctggctgtgtatcccttttgccggacttcttttgtgtattgcggtgctgccgctgattaaggccgagtggtgggaagagcatcagccgcatgcggtgattttctggtcattgctttttattgttccattcgctctttcattcagtgcagggactgcattagagaccgttctggaatgcatcgtgaacgattatctgacatttataatcctgcttttcggcctgttctgtgtttccggcaacattacgatgtccgggacctggcaggctcgcccagggtaaacgtggggctgctggctctggggacgctgctttcaagctggataggcaccactggcgcaagcatgctgatgatccgccccgtcatcaagatgaattcatggagaaaaaggaaacgccacattattgtgttttttatttttctggtttccaacataggcggctgtctcaccccgattggggatccgcccctgctgatgggctttatgagaggtgtcccctttttctggagtttgaagctttttccgcttcttatctttaatatggcagtgctgctgttcctgttttactggctggacaggcgtgcataccgcaaggatattgccctcggcctgaaaccggatatcagtaagcccggtacggaggttaagatcaggggagcgcataatctgatttttctgattatgattgtggcagcagttattttgagcggcaccctgccgggacatccggcgtttcaggatgcggcgggaaatgtgaagggaattcatatttttggggaagtaagcctgggatatccggcgctgattgaaattgctattattttgctggctgcattactttcctttaaaactacggattcggagatccggagggagaaccattttacatggagcgctatccgtgaggttgccgttttatttgtgggaatttttatcacaatgcagccggctctcatgcttttgaaagccaatggcggcagcctgggcattacggagccgtaccaaatgttctggagcacgggactcctttccagctttctggataatacgcccacctatcttgtattcctgaccacggcaggagcgcttgattttacggagggaatgacaacggctctgggggttgtgccgttacagatgctgatggcaatctcggccggagccgtatttatgggagccaatacttatataggcaatgctcccaattttatggttaaatctatagcggatgagaacggtgtccgcatgccgtccttttttggctatcttctctggtcgctcgcaattctgattccggtctttgcactggatatgatattgttctttttatagggagggggatgaacgatgttaaataatgaagagcagctccgggaactggcggagcgtatctacgatctggatgcggaggtttatgctcagttaggttcttccctgggccgtgtttttaacaggaaccgcgaaagctgtgtggatgaactggttaatacaatgctgaccaggccccagggccatctgatgcggagtgaactggcgctgattgccaacatggcccgcacgattaaggataaagaagagcggaagctggttatgacggaatacaaccggattcttcaggaagtaatgagccttcctaccagctttgtgagtggtgatattatcgatccggagatggcgaagctgaacgcattcaatctccaggaccgtttttccagcgaagatcacctgattatctgcattagctggacgtatggctgcggcggcattgatgtcggcttcaaactggccgataaattgaaaatcaactattatgatgccgaaatatttgaggctgtgttaaagcggctggaggcagagaaggatacggtccgcgattcgataggctattcaagcaatccggatctgaatccgaatctggccagtgcatttgaacagacaaagagcctgactcttcggcagagaatgcgtgaattcagccgatatcacggcctttccaagaaagatgccatattctttaatcagagtgacctgctgtgcgatatggccagaaaagaagactttatcattatgggccgctgcggtgatgcaattatgacgaataacagaatcccgcatatcagtatttacatcacggcgccctttgaacagagggtgcgccacacaatggaaatccataacggaatgggggagaagaaggcaaggcgtcttctgaaacacctggatcggcagcattcccattattataatttttatacaagccgccggtggggcaatgcgaataattatgatctctgtattaacagtgcaagttatggaatcgacggtacggtagagtttattctcagaatgattgaccggggcgtaaagaataaaaaataaaatcagctttggaatgccgatttatccggcctttgcaggagtgtcctgcgaaggccgttttttatttaacaggaaagttctcctgttaaataaaaaacgctccgcggaggctcgcaactctaaagagggcttgttcactaagctcgttacactcgctaagtgagccaatgcctgcggcggtagggaataatgtctcataaaaagaacgaatgttcgaaaaaaactcttgccatcaaaatctgaatgtgataaaatgagaatagaacaaatgttcttataaatctgtgcagtgatgtgccggtgacaagcagtacaatggattatcacaatgcggttcattgcttatataaaggagaaagttaatgctgatacaggagaatctgtcaatagaagaaaaactcaaaattttaacggatgcagctaagtatgatgtcgcctgtacatccagcggagtggaaaggaaggggaaggacggctgcatcggaagcgcaagtgaagccggactttgccacagctttgctgccgacggcagatgcatttctctcctgaagattctttacacgaaccagtgtatctatgactgcaggtactgtgtgaacagacgttccaatgatactgtccgcactgcgttcacacccggggaagtctgccgcctgacgatggagttttaccggaggaattatattgaggggctgttcctcagctccggaattcttgacacaccggataaaacaatggagcaaatttacagaactctttatctgctgcgcaatgagcataaatttaacggttatattcatgtgaaggcgataccgggagccgatccgaccctgattgagatgaccggtttcctggcagacaggatgagcgtgaacctggaacttccaaccgccgaagggctgaggaagctggcgccgggaaagacaagggataagatattaaagccgatgcggcagattcagaggggaattgtaaatcagatggcccgtgaagggctcctggaaaagaaggggattatattgccgccgggatttctcaccgactctttaaggactgcgtccgccggtaaaactccggggccgcggacggagctttcggaaagcctgccgcaggctgccggcgcgtcaacgccggtactgtcccgttccggcaccggagcggatgccgcacgccctgcagttattccgggaaagtctgtgtatggtaattatggcgtgggccgtgtatctaatcaaaagtcgtattttgtgcctgccggtcagagtactcagatgattgtgggagccacaccggagagtgattaccagatgatggcggtagcagaggcgctttacaagaatttcgggcttaagagagtcttttactctgcctttgttcccgtgaatcatgacagccttcttccggctctgccgggaggaccgccgcttctaagggaacaccggctctatcaggcggactggctcctgcgatactatgggtttcacgcctccgaactgttatcagaggataagcctaattttaatgtgtttctggatcccaagtgtgactgggcgctgagaaatttgggggaatttccggtggaggtaaatcatgctccctatgcctctcttttgagggtgcccggaatcgggactaaatctgcgatgcggattgtcgccgccaggaagcaggcagtcttaagatttgaagatttaaaaaagatgggggttgttttaaaaagagcggtatatttcataacctgctccggtaaaatgatgtatccggtgaagctttcggaagatgccatcgcaaaccagatagtgggagaggagaagcggcgaaactgggagcttgagcaaaaggggctgttcaggcagatgtctctgtttgatgatttccatatggaggcagcgcctcctgcggaggaaaggatatctgtcttaacgggggagatgtaatatggttatatttatatgtaaagatgattttgactccatactctgcggcgtttatgatgcctggatgagcagactggggcatgacaatgtcagactgcagcttcagggagcctataatatggagttgtttgcaaaataccgcgatgtgcaggtcaccgaagaaaaggtagataaggtgatacaagctgttgtacaaaagatatccagggaagcgtatggctggatttacagggcgtctctcagttatgaaccggagaaggcagacataatttaccgatttctgatttttggattccatataggaaagcagattacggaaagtctccatatacctgctgtccatgagatattccgaataaaccgccacatacagaatgaggcccataatatgaaggagtttctccggttttctgaactggagaataaagtccttttttcaaggattgggccaaagaatgacgttcttccgatgctggcccttcatttttcggatcggctgaggccggagcggtttatcatttatgatgaaatccgggagaaggctgtcatatatactcccaatacaggctggtacattctgtccggcgaggaggggaaaagactggaaaaactgtcggagaaatcagatcggaaggagtatgaaacactctggaaaatcttttttgacagtgtcgcaatcaaagaaagagaaaattatgtctgccagagaggccatctggctctgaggtaccgcccctacatgacagaatttcaataaaaaaattaagaattaacaggcggataatcctgataaaatcagggtgttaaaaatatattcttacgaattctttcctttttcgaaaaaaaaggaagataattttattcttcattaatagattggtcacaattttgacacaatttcaaattatcattactggcgtaccacgaattaagtaaattgattcaaaaaaagaggagatgtaattatgaaaaaaaatttagtgaaaccagcagcagtaatgatgatgagtgtaatgttagcggctaccgccctgacagcttgcggcggaaccgatgcaggcactacaacagcagccgtaaccgaggcagagacaactgaagctccggagacagcagcaccagaggagagcacagaggaagttaattctgagtcagcagaagatatcacagaagcagctgacacagaggagacagaggcagcagagagccaggctgaagatgctgcggcagaatccgacgatgcagctctgattgaggagagcacagctaactaatcgttagcaggctgataagcctacataaattaatcaggttaagaaaaatgtaaggagcggccgcttgacagcggaccgcttctctcgtatactaagtgtattaaatgaattaatacacttaatttaaataatacgggaaaggaggagcctatgattctgattgactataaagatcggcgacctatatatgaacaggttgtagaaaaactgtctgagctgatggtgcgaggaattttggagcagaacagccagctcccatctgtacgcagccttgcaacggaattgtcgattaatcccaacacaatacagagagcctatgcggaactggagcggcaggggtatatttattcggtaaagggcagaggcagttttgtggccgagaatcaccaaattcgtgaacagaaaaaaaaagaaatttttgtgagactgggcagacttgtggaggaggccaggggaacgggagtcacgatgcttcaatttcaggagcaggtgatacagttctatggcagcagtgacaggaggccgcggccagcggcaggaactgcggctccggtaaaagaatcgcaaattctgccggctgcggaggcgacgttaactgccgtacatgagccggtgacaaagaatcagatgacggaaccggctcttggaggcaagagggaggaaaaaggaggagaaacggatgattgaagcaatcaacctgacaaagcgatttgacgatatcaaagccgttgatcatattaatgcagtaatcagagagggcagcgtatttggattgataggtacgaatggtgcaggaaagagtacgtttctcagaatggctgccggaatactgaaaccggatgagggcagagttacgatcgacggagaagacatttttgagaatgataaggtaaaatcaaaatttttctatatatcggatgagcagtattttttaaataacgcgactccgggtgagatgatgaagttttacagaaatgtatacaggaattttgacgaaaagcgatttttcggcctgctttccaatttcgatttggatgcaaggcggaaggtaaatacattttcaaaaggaatgaagaaacagctttccgttcttcttggaatttgtgccaacacagactatatattctgcgatgagacatttgacgggctggatccggttatgaggcagacagtgaaaagcctttttgccaatgatatggaggagaggaacctgactccgattattgcctcacataacctgagggagctggaagatatctgtgaccacgtgggacttctccacaaaggaggaattctgctgtcaaaggatctggatgatatgaagctgaatatccataaggttcaatgtgtacttcttccgggtacagagccggaaaatctgcacggaattgacattatcaggacggaacgcagggggagcctgctgactctgaccataagggggaaaaaggaagagatagaagcggttatgcagaccttccatccggtattttttgaactgattcctctttccctggaagaaatatttatcagtgaaacggaggtggccggttatgacatcaaaaaacttattttttaatctgatgaaagaaaatacgaaacagcgcctctggacagtcgctttgatatcattaatattcttttttacatttccggtgcagacggcgctgttaatcagcagttatctttcccaggacagaatcgatgccgtttgggagagggaagcgcagggagtcgaggtgataaagcagcagcttcaggaaagatacttaagctggactgcaatagataatggcatgttggtttttcttcttatcgtttttgccgtagtctgcggtatttcgggatttgcgtatctgcattcgcgaaagaaaaccgacttttaccatgcaattccggtaaaacgtgaaagattatttacagtcgtatatctgaacggcgtcctttatacggctgtgccttatctgatatcccttttgatatcttcattaatgattcaggtgaaagccgggcagatattcccgtggggagaggtgttaaagacttactgtatccatatgtcgttctttttgttaatgtatacggtagtgatagcggctgctctgatgaccggcaataccattgtcaatgtacttggaaccgcagtgtttttcctgtggggaccgggaacggtcatgctgcttatcggctatttcagcagctattatattaccttttaccaggacgggaacagattcgtagagcttttgcaaaaatcatcaccggcagcctggtatatcggagcggtatcagaaccggaaaaagcaggctcaatggcgctgtgggcggttgcagtaaccgtacttcttatcgcgctctgtgtatttctgtataagaaaagaccttccgaggcagccgggcgcgccatggcattcagaaaaagccagccggttatcaagctgctccttgtagtgccgattgcactcaccggcagcctgattttcagagaaatgatgggaagcgacggatggagcattttcggtctggtctgcggacttgtaatcagctacgctattattgaaataatttataactttgatttcagaagactgtttgcacataaaaaacaatttgcactctgtacagtctgctcattggcaatccttgcatttttcaggtttgatttgtcgggatttgactcttatgtgccttctgaatccaagatggaagcggcaggaatttactgcaggcggatggacgcggattttcttgaagactatttgtctgaattggagctgaacagtgactccaggggctatgattatgtgagctggaaatcgaaatcagcaggagaactggtgaaggagatgaaactggctgatgtaacgtcggtgattgaaataggaaaaaggggcgttaccgatgccgaacaggcaaagaaacgaaaccacggcattcttagaagcggccgctattattaccgtgattcgagtgacgaaacgattgacgaggtagtggttgcttatcatctgaagggcggaaaaactgtgctgcgccgctataatatgaatctgtcagcggtaagcggagcgctcgacaaaatttatgacagtgaggaatataagacggaagtttatccgattctttcttatcaggcgtcggatgtggcaggaatcaattatgaggaatacggtgatttcagtcatgtgaacctgaagaatgacgaaatgaaggctcggattctggaggcgtatcagaaggagttaagaggcctgactgccgaaacaagaagagaagaaagcccgattgcagcaattcagttcaaaacgggcgagatgcaggaaatgattgatacgctcagagaaaaaaagcgcgacttcagtgtgttcaacagaaaattttattatccgatctatccgtcctttacggaaacaatcagcctgctgaaagaatgcggggttgatgtgggagaattcctgacagcagacaaggtggataagattgttatggaatactacagaagtgaagaagacgtggaagagataccgtctgctgaaatggaaggtgtctattcaaaagagcgcggaagctggaaggtcacggtaactgataagaacgagatccgccagatccttgacagctccctgtctgacagcctgaactgtacaaattatctgaataatacctttaccggggtgaatctgactgcctatgtgtcggtcaagcgggggcagacggaagacgagtttgatgcggctgccatgcctgaaacagtgcagacggagagtatagatggaagagaacaggagacggaatatgtcagatacggactgcggtttgactacgacaagattccggattttgtaaaagaaacgtttaaattgacggaagaaaatatgaaaaatgatgtaatgtggggctattagaagctgccttaagtggcccggttttacttttgattgactttctctcctttacaggataaaataagtgaggaaaaatatcctgtagaggaggaaaatgaatggcatttttagatgaacttggtaaagtaatcagtgataagagcaaggaagcagccaataaagtgaaggatatcacaggcgtaatccagctcaaatcaaaattgtcagcagaaaaggaaaaagttaataaagcatatatcagtcttggaaaggcatactatgacaggcacgaagcagcgctggaagatgagtacgccgatgaattcaagattatccaggcgggtctgattaagatggctgtactggaagacgaaattgcagaactggaaggaaccagagtctgtgcggagtgcggagccaaggtagagagagaggccctgtattgcagtaagtgcggtgctcctatggaggataaaatggcaggcgcctcagaggatgaggacagtgaagaaccaggactgcagtttccggtaaagacggcggcagatgaatccatcttcgcagaggaagacagcgaaaacgaagaataggagatagaatggacgcattagtacagtggtttacggccaatctttctgagtttatctcaaaagaggcagttatttttattatttccatggtaccaatactggaattgaggggaggacttctggcggcttcgccggcacttctcaatgtaccgattatgcaggcaataccaatctgcattatcggaaatattctgccaatcccgtttattctgctccttatcagaaagatactggactggatgaagctggtgaaggtgttccggccaattgctttgtggctggagaataaggcgatgagtaaaaaagaccagattgagaaatatggattttggggacttgtgctttttgtagggatccccctccctggtacgggagcctggacaggctctttgatagcggcgcttttgagagtgcgttttaaaacagcatttgcagcaatattaataggcattgtaatcgctacggtcattatgtctatcctgtcttacggtgtgctgggagtcattttcggataagaaataacagtctgcggtatggtacggaactttaacatgttcctgccatgccgcagttttttgtatgcattatccggttcagatattcggatacagtatattttcggaaagtatggagattcttgataacgaaacagtttagatggatatttaacggaggttaggaggacgcgtccgaaacggaccatgtccggtgtggtgagggggctgtctgagtcttccgtccccgtgggaggttggtcgtggaggggaatccggccggaatgaattgctgcggggaccgtttgcactctttggagtgcgcatcagtgctaagctcgtgaggaacctcgctaagcaccggcggactcccatgtcccctccgcaattgattccgcctacttccccggttcaggttatcgcagggacggaagactcaggcggaagttttcgcggcaccggacatggtccgttccgggcgctgattgtctccaaccttaaatggagagggccctgtcgcgaccactacgtgtttccgacaggccgatatcaaatcttccacaattctttcataagggcgccttgaaggcatatcgtatttcccgcacacggtagcactgattggcctcgacaaggtccgcccacacacttaacgcgagagacattcagcggccgcaggccagcggacggggccgatacccccggcggagtctttcgtcccggcgaaaacctggccttggggcggaggggaagataaagtctgcggatgccgttgaaatccatcgctgattagcgaggtcctgccgagcttagcagcgcgatgcatttcacagagcgggagcgtgctccgcagactttatcttcgcccgcagccccaaaccacgataatcttcccccgggacgaaagactcatatacacaccccaccaccccgtccgctggccgtaccggcggcgtcctcacctgcttaactaaatctccattagatgcttgacaattgggaaaaaatcatatatgattaatatacctatagggggtatatgtaatgaagggagataatctatgaaaacggaaatatacaacatagacggaatgtcgtgtgcagcctgcagcagtgcggtagagcgggtgaccaggcgtctggaaggggtgcaggaaagcaatgtcaatctgacgaccgctaagatgacgatcacctacgatgaagcaatggtgactcaggagatgatagaagagaaagtggataaggctggctttaaggcgatgctggttcccgacgaacaagatagaatggcggaagaggaggagacgtttgccaggcaggaggaagcgcttaaagccggcagaaagaggctgattgtggcaatctgttttgcggtgccgcttttatatatttcgatgggacatatggtgccgttccctatgccggtgccggatatcatcgatatgcatgcaagcccgttgaatttcgccctgattcagatgattttaacggttcctgtattaatttgcggaaagaaattttatctggtgggacttcgggcattgtttaaaggcaatcctaacatggattccctggtggcaatcggtaccggaagtgcatttatatacagtttggtaatgacgtttaaggcgttcagcgacccgatggccgtccactccctgtactatgaatcggcagcggtggtggtaaccctggtaatgctgggtaaatatatggagggaagaagcaagggaaaaacttccgaagccattagaaaactgatggagctggctcctgatacggcgattctgtacgaaaacggtgaggagcgcgaggtggaaacctcttcggtgaaggctggcgatcatatcctgatcaaaccgggcaacagaatccctcttgatggcactattgtaaagggaagcagcagcgtggatgagtccatgctgaccggtgagagcattccggtcgaaaagagcgtgggagacagtctgataggcggaagcatgaattataacggcgccatggaagcggaggtcacccatgtaggcggtgataccactctggccagaatcgtgaagatgatggaggatgcccagggcagaaaagcgccgatatcgaagctggcggaccgtgtggccggggtttttgttcctgctgtcatgggcatagcgattgcagcggctcttttatggcttgttgccggtggaaaagacatggcctttgtactgactatatttgtggccgtcctcgtcattgcctgcccctgcgcactcggactcgcgacaccgacggccatcatggtgggaaccggcgtcggggccagccacggtatactgattaagagcggggaggcgctggaaattggtcacaaagtagataccgttgttctggataagacgggaacaattacggagggtaaaccaaaggtcacggatatttttgcggaacagggctggaaaccgtcggagctgcttcgcgttgccgccagctgcgaacagatgtcggagcatccgctgggagaagcaattgtggcggaggccagggagaagagcctgtcacttgcaaggcctgaggaatttgaaagtattaccggatccggtattaaggccgtcctggaggggcatgaaatccggatcggcaatatcagaatgctggaagccctcgcagcctccggtgaaacgcagagcggagggcagtcagatatttcggccctcacgaatcaggctggaatctatgcggaacagggaaagacaccgatgtttatccttgtggatggaataatggccggaatcatctgtgtggccgacacaataaaagaaagcagcatacatgcaattgataagttaaagagcctggggctggaagtatatatgctcaccggtgataaccgcaaaacggctgaatatattgcacatgaagcacatattgacaatgtgatagcggaggtgttgccgggtgataaagcgggaactgtggcagacttgcaaagtcaggggaaaacagttatgatggtaggagacggcataaatgacgctcctgcgctggtgcaggctgatgtgggaacggcaatcggttcgggaagtgatattgcccttgaatcgggtgacatcgtattgatgaaatctgatttgatggatgtctacagagcggtgaaattaagccgcgccacaatccggaatattaagcagaaccttttctgggcgttcttctataattcgctgggaataccggtggccgccggtgtgctgtatctgtttggaggaccgcttttaagtccgatgctgggaggctttgcaatgtccttaagttcggtctgcgtagtatcaaacgcattgcgtctaaaaggactgaaacttgattaaattcaggctgagctgacggagccgggaagcaaaatagaataaaaactgtataaagggggaacgggatgagctgttgtggaaacgaggagaggcataagcacaggaacctgaccgaagaaaaggatttattaaaaaggcttaacagaattgaggggcaggtgcgcggcattaaggccatggtggaagatgagcgctactgcgttgatattctgaaccaggtttctgccgtccaggcagctttaaacggcttttccagggtgctgttgtcaaatcatataaagacgtgtgtgatagatgagattgaggcgggaaatgcagaagaaacggtggaagagctgtgcaagacaatccagaagctgatgaaataataagaatttgtaaaggagataaaaataatgaaaaaatttaaatgcgaagaaattatgtgcggcaactgtgtaagccggattgacaaggcccttactgcggcggagattgagcatcaggtagatttgaattcaaaaacagtcacaattgagggatgtgaacactgtgaaaagaaggcagtggagatcctggacgatttaggattttcggcagtggaagtttaagccgcagtgcgagcctccgcggagcggtttttattgatgacggtgacctgtgcacggagcgtgccgcttatcgtttaacaggagaaaattcctgctaaaaaaatctgcgtatatctgcgctggaatttgtaacagatatacgcagacaaaccttccaatatgacttaaaaccttgctatagcggtgaaaaatgaggcagttaaggaattgtattaattgcatgaaaaattttttaaatttttctcaggaaatggttgacatttcctgatatttatattatactaccaaaggtatcgaggcgtggctcagtttggtagagcgctgcgttcgggacgcagaggtcgcgtgttcgaatcacgtcgcctcgattacacctcagtatggcctgttggtcaagcggtcaagacgacgccctctcacggcgtaaacccgggttcgattcccggacaggtcattttagaatctgctttggagtgaatccagagcattttttaaacgcttccgtggctcagttggtagagcaacgcattcgtaatgcgtaggtcgccggttcgagtccggccgggagctgtatggtaagaagtcgaaattccttgtaaaagtaaggggtttcggctttttttgttgatggcggtgacccgtgcgcggagcgtgcagattattgtttttggcgccccctaattgatggtggttcgcactatggacgatttcgattttcatgtcaataaaaagatttcaaaagatgaactgcataaaatgactaaggagattattgatttaaaacaggaaaagcagtagaaaacacatctacataattctatggtcatatattccatttatcgggggctcgtcattacgacagtcctcgtattgaagaaatataattggagtggcagtctcatgtccgtccgttaactgtatttgcattggacattcataaaacaagggcagaagaaaaaatatttcaactgcccgttttttcactgttctgttttatttctgtatcatccatatgtaattaacaaagtatattaatgcaccagattacaaacggctgataaaacacatcaattaaaaaggctcctacaatcggcactatgataagcgctttacgtgataccccatacttggtatgaatggttgtcatattggctacggccgttggtgttgaaccgagatcatgaccgataagtcctgccgacataacggcagcatcgtagtttttcccaagaatacggaatacaacaaaataagtgagaagcagcagtatgacagtctgcgtgcaaaggacgattaacagcggcagcgctaattcggccaattcccacagcttgagcgtcagcagcgccatggacaggtacaagcccagactgatatcaccgacccgatcattgaaatcaatgctgaaattgtaaaaatgaaacttttcatttaagtttcggaccaagacggcgaagaacatggctccgacataggtggggatagccatgccgattaaaccgcctaaataaccgacaatcatggagcccattgtcatacagagcatcagtgcggtaagatttttcatggtgttggcataatccatttcgatatgctgtgcaccggcgtcatatccggaggtatcaatttggaaaccatcatcattatcgggcgtcagattataacgttctatcagccgtctgcccagaggaccgccgatgaggctggcgacgattaatccaaaggtagcggaagccaaaccgaccagactggctccggggtaccccatggcttccagagtctgtccataggcggcagcgcctccatgcccgccaaccagtgcaacaggaccggagacaataccgtacgcggcgtcaagtccaagaaccggtccaagaaacacaccgataccagtctggaggacagtgatcagtacatttacaaaccagtagataaataaaagcttgccgcctgttaaaagaactttcaggctggcccgaggccgaccgtcgtgaaaaaggccaacataaatactgtctgtaaagaggcgtcgaataccagatttattctaccgctcatgaagaataaacagtttagaaaaacgaaaagaaatccgccgattacaggtgccggaatacaaaatttttccagaaaataaactttgcttttaatccagtaaccaatcaacagcaggattgccccagggtcattgtaccgacgctgtcaaatgacaaagtgaaaattgaatctgcaagctgcatttccataaatactacctccttttttctgtcgaattagataagaatttctactatatttagttaaattatatcgattttatttgattctgcaagacaaaatgcgtgaaaattctgtaaatgttttaatgttattttatttgtgctaattttttgaaaaaataaaaaagataaaagaggcgctctgcacccgatccatattacgaaaaacggttctcattttcatgaaagggaataaaatgcagaataaaaaacaaaatatatttgaggagaactgaaacgagaagtgaaccaaggcgggaatgggatgaggaggtgaaaaatataaatgataaaatttatgaatttgatgctgtaattcagaaagtacccgatattgacggagcctatgtaaatattccttttgatgtgaagaaagagttcggcaagggaagagtaaaggtgcatgtggattttgacgggacagcctacgaaggaagcattgtcagaatgggaactcctggccatattttgggggtgagaaaggacatccgtgctttgattggaaaacagccgggagataccgtccatgtggtcatgagagaacggtagtacctgacagtcacatatctgctcaatatgggaaggaagggcggtcaaataccgcccatgccgtcacgggagtggcactcttttgggagcttatccggtctcagacccttgaagaccggctgccgcataccgccatttgccgtgtactccataaattttacgacacaaaccaattgaggttcaatccagatcgcattttcattaccatgcggaggtgcaaaaagaggggaggggatttgtggcacttctttaatacgctgaaaattttcccctccgacaccgagagttacatgacctttatagataagctgctcatgctcatactgtcccagaacaacacttatcatattattgtccttaaatatatatccgcagactacaaaatcatcgtctatcaggttttttattttgatccagtccttcgttcttttaccttctatataaaaactgtcttttcttttggcgacaatgccttccatgtcctgttgtttggcgagtgtgtaaaatgccataccctggccctcgatgtatttggataaggccattcgtgctgtttcctcacctaacgctttggaaagatatactttgcgctccataagcggcagcaatgttaaatccctgtctttgtaatataaaatatcgaaaggtataaagctggcaggatattgttttgaaagcaactcaattttaaacggattagacatcagactgcgtttctgtatttcaaagtagtcagatttgccgttttttaaaatgattaactcaccgtctaatatacatctggctttaacctgcttgtgtagatgagtaagctcaggtactttagaaagcattttaagatttcgtttattccggagctccgtaccggtctttggatccagataggcaatgcagcgctcgccgtcccatttcaattcatagatatagtctgcgctgtcaaatgcatccccgctggcgccgataagcatcggatgtatcacttttgcatcgaaatcaatcatgctgttgctgccttcttccgtccgcgcggcttcttcggggcgcggtgccttcaatctgctgcagagaggcctgcagcgcttccataatattgattacgttgctttcctgctcagccggtgtctgaacaatttcctgtccattgatttttgcttctataatttctctgagacgaacctgatactcattatggtacagctgtggttcaaattctttatccatcgatccaatcagcattttcgccatattaagctcagcctcgttcagttcaggatgtgctgcttcctttggtatttctttaacttcatcatagaaaaagagtgtttcggccaagatacctttctcggtcggaatcagacaaaggagtttttcgctctgtcccattactgtttttgcaattgccacttttccttcatcgaacatggcctggcgcagtaattcatatgctttatcacctccggcctcgacgactgcatgataggttttgtcaaaaaagatgggacggatgttttttaaatcagtaaaatgcaggatctggattgtcttgtctttttccgtctttgccttttcgaaatcagcgtccgtcattgtaacgtattgcccgggagcaaattcaaatcctttcacaatatcctgaaagccgacttcttttccgcagttggcacagacctttttgtatttgacacgtgaaccgtcttctttgcacaattgattgaaatgtatatcattatcctgtgtggcggtgtggagcgccaccggaatgtgaaccaggccaaaactgattgcccctttatgcgtagctgccatatgcttgttttactccttttttaccttagtatatacaatttctcctcaacaatccaaattagcctgttatattgattaatcatactgattctttcacagcattcataagatagaatgaaaacagggtccgccggagcggatgtctaagctttggcaaacagaggaggtttttttattcacagaatattggatgagaatttttttgatatggtagttaataactcgttatctgttccaatggaaagtgatgcaggtactacacggttgaatgacagatattctgtcatacatctgcctggcagcgaattcagcatgtgcggcctgggaacatatccctaccacacattcccaggtatttataccttgaattccaatataagtctggaacagagcggaattaatgtagtcaggaacaacccgaacttatcgcttttcgggcagggcatcctgattggaatcgtggacacgggaattgaatacaggcatgaggcatttttgaatccggatggttctaccagattattctccatttgggatcaaacgataacggatggtgagcctccggcgggatttacctttggatcggaatacaataaaacaatgattaacatggccttaagaacacaggagcctcttgccgttgtacctagtattgatgagttgggacatggaacaatgctggcgggaattgcggcaggcagcaggagggaaacggataatttcagcggggtggctccggaagcagaactggttgtggtaaagctgccgttggcgaagcagcttaaccgaaaaatattcagcattccgtctgatactgtctgctatcaggaatcaaacattatcattggaattgaatatgtattatcaattgcccaacgtctgaacagaccgttactcatctgtataggtatgggctcctcccaaagttcccatgacggtcttggtctctttgccggtactttaaatcaactgtcggcattgccgagaatcggatgctgtgtggcggcaggcaatgaaggaaatctcagcagacattatcacggaacttttaccgatcagatcatggcgagaacatttgaattaagagtaggagaaaaagacaaaaacttttttatggaaatatggcagaggtcacccagccggttaatgataggaatcagtgcgcccaccggtgaaacatttcatgcaataatgcccggcttcagtgaatgcagggaatataaatttttattcaatccgacaaaaatttatatcaacaatattattgttgaggaagagtcaggggatcagttgattttaataaggttcaatgatgccgtcaatgggatatggacaatacgggttaacaatattgagacaatagcaggagattttaatgcctggctgccggccggtaatattatttctaaggatacttattttcttgaaccggaccctgacaatacaataacatctcccggcaacgcacgtaatccgatgacggtgacggcctataatcaaattaataacggtatactgccggaatccggaagggggtatacgacaagcggcttggttgaaccggatattgctgctccgggctttgccctgtcatgtccgactattgccggtacgaatacgtatggttcggtaactggcacggggcggcggccgcacatgcggcgggagcggcggctcttcttatggaatgggcggtattgaggggaaattatactacaattacagggagagatattaaccggctgtttatccgcggggcaattcgtgataaagcagttgtatatccgaataatgtgtggggatacggaaggctggaccttatgggggtattgagcagtctggtataaggacaatgttaaggagataggactgacagaagcgccggcttaaaataccagcgcttccaagtaactcaaagaaaattaatttttgtagcgtaagcctcgccataaagcggtttataaatatctacgacggcaaaacgagtcggcagttcctcccgttttggttcagctatcgtgataaaacggtagtttgttccgttgacaatctgtttggcaacagcaactggattataaaagtaattttcatgttgccctatggcattgtaaaaaataaaggagtcatagggcgtgaggtatgactgataagtccagcctcctggcataattacacctcgaacagcaaagttaatgtattgtatgcatatttggaccgccgtgtaccagggggattctgcacataaataagttgaactttttctcaaaatcatggataataggaataacggaaggctttaaggaggaacagcatatgaatttgcagtggctgtactatttcaatacaattgcagaactggaacactacacgcgggcggcagaaagacttcatgtcagccagtctaatttaagtcatgccattaaagagctggaagaggaattaggcgcagagctgttcgagagaaaaggccggaatatcaaattgacaaagtatggtgaaatatttcagccttatgttcagaagacgattagttctctggaggaagggatttcaaccttaaaagaatatattgatcccaatgtggggacgattgttttggcaggcttccagtcggtcgcccagtttgcaacggatctcatggtccgctatcagtcggatacaaaccgtctggaagtgcagttccaatacagccaggaaatctggaagggaattcaaagcaagctgctggacggctccgtcgatctgattattggaacaaggctcagctatccccagatagatgccgcgtacatcggcacgcatcctttgatggtgctgataccggagggacatgagctggcgtcgggggacagtgtggatttaaggaaactggacggtgaaaattttattgcctttgacaccaatgcccagctgcgcggacagcttgacaatctgtttaaagagataggaatttgtccgtgtatcgtatccgaaactccaaatgatcagattatttacggcctggtcgcagccagaaggggaatctcaattgtgccgtatccgctttccggagcgccttataatacgaaaatcctcccaatagccaatgatattccacagcgcaggctttacctgcagtggaataaagaacgctatattccgccggcggcgaagtatttcagggactacattatccgcagcggcgaggtgttcgaccagtacctggagcatcatgggatgatgattcattaaaataatgttcaccgttttaatccattctccagtcagatgaaatcagttcgatgcggtcagaagctcaccctggagaagagcatgcatactgctgaacaatcagattcctgactttctgcaccgccggagtcagcggccggctgcggtcccaggaaagataaactgtcctgagaaattcctttcccttatcatcgatgggaaccatgcggacgcgttccgtcttcattgcaggaacctcggggaggatcgagacaccaaatttgagagacacatactggagggcggcattgcactcccgcacttcaaacacgacttttggaataacgccgcgctttgtaaacacctgatcaagctgtcttcgcaggctgcttgccttgtcgagcatcaccagtggttccctggcgaaatcctcaaaggtaacggaagaacgcttagagagaggatgctcaaagggaacggccagatagagaggttgtttcataatggtgatggaatcagcccattcatcccggtgcgtacaaaatgccaaatccagcttaccgcttttaagcagtgtaaaaatgtcaaaggaagtatcctcggtaaaatgaaaacgaatctgtttattctccgggagacggtatacttcttcaaccatggaggggatcagggaggaggagatggaatggaaataaccgagacggacaaccagcggggcagttcccgccatctgcttcagtgtgttggttccctcctccatcagcatcagggatttctggacataggggagaaatctctcaccataatccgtaagacagattttccggttctgtttttcaaacagcttgaccccgagttccttttccaattcattaatggagtaactgaggctgggctgggcaatgtgaagttcttcagccgcgtgggtgtaatgcagcacgcgggcaagagtctcaaaatattgtaattgaagcagagtcatgatgacaccatcctttttcaatctatcacgctttcgtgaaaccgtactcatagtatatcataagccgcaacggatttctacaaaaaaccgccctgtgttccggcctccatagaagctttctatgaaaataagagaaatacggtattggactttttggcctgtgtccattataataaaccggcagggtgcagagcagagagaagctctgcgccctgtttgcgaaatatggcatattataaaaggagaaagagagaatgctgcaatttcacggaaatgagaattatattgcttcggatgaactgatccgcagcgtcaacatagctgctgcgcttaagaagccgctgctgttaaaaggggagccgggaaccggaaaaaccatgcttgcggaggcgattgcaaaatcccttggaatggagcttttgatttggaacatcaaatccacaacaaaggcgcaggacgggctgtatgtttacgacacggttcagcgtctttacgacagccagttcggcgaggaaggcgtaaacgacattgcaaagtatatccgtctgggaaaactcggtgaggcgtttaaaagcagcagacaggcggttctcctgatagatgaaatagataaagcggatttggaatttcccaatgatcttttgtgggagttagatcagatggaattttatatcccggagacgggggagaccgtaaaagcaaaggtccgtcccatcgtgatcattacatccaatgcggaaaaggagctgccggatgccttcctgcgccgctgtatcttccattatattgcgtttccggatgcgccgatgatggagcggattatcaaagcccattacccagggcttgaggaaacgctgattgggggagttttggacgccttctaccggatacgggaacttaaaggactccagaagaagccgggaacttcggagatactggactggattcaggctctgaatatcggaggcattcctgtggaggtccttgaacgggaaattccctttgccggcgttcttttgaagaaaacggaggatttaaaacaagtggagaaccaatatgttcactgattttttatatattttgcgcgggtacgggatgaagaccagcctgaatgaatggaccggcctgatggatgcgctggatttaaatctgaatgaggccagcctgacggaattttaccatatggcaagggcgatcctggtaaaaaaagaatcggactatgacaggtttgaccaggcgtttctggagtattttaaaaatgttaaggaacaggactgtctgcctgaggcgctgcaacgctggctgtcgaaggcgatgacgcagacgccctttgaccgggaagaggcagacgcgcagtggggaaaaaagaatatagaagaaatccgacgtctgatggagcagaggctggctgaacaaaaggaacagcaccacggcggaaataagtggatcggaacaggcggaaccacggcgttcggtcactccgggtatgcgcagaaaggcatccgggtgcatggaagcgggatgagcagaagcgcgctcaaagtggcgggagagcgcaattaccgtgacttccgggaggataaagtcctccagctcaggcagttccagatagccctgcgcaagctcaggctgctttccagcaaagatgacggggccaggacagaactgaatgtgacgaaaacaatagagaagacatgtgaccggggcggacggcttgagcttgtcttggagagaccgagaaagaaccagacgaagcttctgctgttaatggacagcggcggctccatgtgggcctatgccgatctgtgtaaccggctgtttcaggccgtgaaccaggcgtcccagtttaaggacttaaaaatttactatttccataactgtttttatgatcagttatttacagcaccgcaatgtaagtgggaggacaaggtttccactgaatgggtgctccataacctgaagccggaatacaaggtgattgtcgtgggagatgcgactatgggaccggcggagctgctggagcctggcggtactctggactacgaccatgagaatgataaggccggaatagactggatcaagacattaaagaaacgctttacgtctgctgtctggctgaatccgctgcatgaaaagctttgggattatgatgcatctacccgtacaattcaaataataagagagcagtttccgatgttcccgctgacggtccagggcctggaggcggctataaaagagctgagaaaaggagaggcgtaatgcctctcctttttttgaagacggtgatctgtccgcggccttcggtcttctatgcaagactgtttataaaagaagaaagaagatcggcagggagctgtcccggcgcggaggcctttcctgcggtgccgaaggtgatggcggatccgaatacacttccgcataccctgctgataattccctggcgccccatggacatggtgataacaggcgtctccttatgttcttcgcgcatggtgagagtggcgtccagaagtgtgaggacatcccgctcattctgcggcataacggcatatttggcgatatcggctcccagatgctgcatctggcagagacggctcacaattgtctccttcgatggcgtcgaggtggtgctgtggcgggaagctataattttcatcccggcgcggtgggctgcctccacaagagttgtcatcgtatcgtcccctttggacagctcaacgtcaatcagatccataaggccggtctctatgacgtcaagattcattgcaatatattcctccgtttccatgcccgccattccgccctccgaatcagtgcggagcgtgaacagaatcggagtatcccctaactggtcgcgaagataagccatggcctgaaatcgtacctgcggattttcaatattctgataaaaatccgcacgccattcaacaaaatcgaaggggcacttttcatcgctttgacggactgtttaagtcctttcaaatccgtatccgtgagcggaatgcatattttagggattccttcaaattccacagttttttataacatcttaattcccttataggttttacttttaccggtttaacggctgcggtgctaggataaaacggtaaggaggaatggtttatgacttgtattattcagacattttacaattttgaattaagatttgattcggcagtcaagctttttgcccgctttcatccgtatctgtttattgtctgtgcatttatcgggatacccgtttttatccttggcatggtgttttccctgaccgcggcatttatgctgccggcggcctgcctgttcggatggtgctgaggagcctgaagatgcatcctaatacaatctttatacgaatccggccgggctaacacaatttttataacacaggtgctagaatctgttttataaaaatcaccggagcctgtaataagctgcgacccggtgaaactaaaggaggaaatgagatgatggatatttgcatgatcggtattattatagtgagctgtgcgctcatgaaactgctgattgactggtgtgagtcacaggttggcccgggagagcgaaaatgagaattcaggagcttgagcgttaaacgccggatgcgctgaatggaaaaggagtggattatatgatagttttgggcattatcattgcagggcttgccgcgtatcttgtatacgcgcttgtgtatcctgaaaagctgtagttaaagactcacgaggaggaagataataatgtttcagatattaataacattgcttatttacatggttctggtgattccgatcggcatttacctgtaccatgtggcaacaaaacagagaacatttgcggatcctgtatttgaccggattgacggtatgatttacaggatctgccgcattaacagagaggatatgcactggaaaacctacgcattaaaccttctgatgacaaatgcagttatgatactgataggatatctggttttgaggctccagggacttttgttcctaaaccccaacgggatagcatcgatggaggagagcctgtccttcaataccattatatcctttatgacaaatacaaacctgcagcactattccggtgaatcaggcctgtcctatctcagccagacggcggttattatttttatgatgtttacctccgccgctaccggatatgccgcctgcatggctttctgccggggaatggccggaaggccgatggggaatttttatgaggatatggtgagaaatacaacaagaatcctgatccccatctcttttattgcaggaatgcttcttatctggcagggtacgccccagaatttccacgcgaattttacggtttcgacgctggaaggtaaatggcaggacattgctgccggaccgattgcagcgcttgaggctatcaaacatgtgggaacaaacggaggcggctttttgggagccaactcgtcgacgccgttagagaacccgacgattatttccaatctcgtggagctgtactccatgatgattttaccgggcgcctgtgtcatcgcatttggcaatatgattgcggacaaacggaaaaaagaagggaaaaaatcgctcttcggcagacagggcagaacagtctttgccgccatggcaattatttttctgattggagttacggtatgtttcgcggcggagagtgccggcaacccggttcttgccggaatcggactgaatcaggatatgggatcctatgaggggaaagaggtacgatttggaattgcccagtcggcgctttttacaacgacaacaacctcctttaccaccggtacggtcaataacatgcatgactccctgacgccgctcggcggtctggtgcctctgttacatatgatgttaaactgcgtgttcggcggcaagggtgtcgggctgatgaatatggtaatgtacgtcattttagccgtatttatctgcggccttatgatagggcggaccccggaatatctgggaaagaagattgaaggaaaagaaatgaagctggtggcggtctgcctgattatccacccccttctgatacttggcttttccgcattggccgtatccatggcaggcggtttggcgggaatcacaaatccgggattccatggattgtcccaggtgctttacgagtacagttcttccgcggcaaacaatggttcaggctttgagggtcttgcagacaactcggttttctggaaccttacgacggggattgcaatgtacttcgggcggttcccggcaattatactgcagttggcaatcgccggaagcattttcgcaaaacgcagggtgaacgagacggtcggtacgttaagaacggataatgtggtatttacactgattcttgtctttgttgtatatatttttgcggcgctgacgttcttcccggcactcgcactgggaccggttgcagaacatctgacaatatggttcccgggattaagttagcttaaggaggcagaagtgatgtcgagaaagaaacagcagacaactaaatttattacaaaagatatattgaaaagctcggtaatcggggcatttaaaaaactggatcccaggtatatgcttaagaatcctgttatgttcgtggtggaggttggttttgtcattacatttgtactgtgtttcatgccaaacctgttcggggatgtgaccgcatccggtggaatctctgaaggagccttaagaacctataatattattgtgacgttgatacttttcataaccgtattgtttgccaactttgcggagtcggttgctgaggggcgcggtaaggcccaggctgagacgctgaagaaaacaaagaaggatacggtggcccatcttgttttaccggacggctctgagcgggatatacccgcctgcgatcttaaaaagggcgatgtggtgattgtgagaatcaatgaactgattcccaacgacggagaagtagttgagggaatcgcatcggtcgatgaatcggccatcaccggagaatcggcgccggttacccgtgaatcgggcggagatttttcgtcggtcacaggaggaacgacagttgtatcggactggctgaaggtacagattgcggctgagccgggtgagtcctttcttgataaaatgattgcgctggtggaggggcgtccagacagaaaacgccaaatgagatcgccctgaatacattgttagtcggcctgaccatcatttttatgattgtaattgtggcgctgtatccgtttgccgtttattcaggcgtccatatcccggtagcgactctgatcgccctgatggtatgtctgattcccaccacaatcggaggcctgctctctgcgattggcattgccggaatggaccgagtgacgcgttttaatgtcattgccatgtcgggaaaggcagtggaggcctgcggcgatgtggatacgatgattcttgacaagaccggaacgattacttttggaaaccgccttgcagccgatttttatccggttaagggagttacggtccgggagctgatggaatactctgttctggcttcccttgaggacggtacgccggagggaaaatcgattgtggaactggcgcgcaagatgggtgctgtgacagaaaaaaatgctgcggataaaatggaatttatcgaatttacggctcagaccaagatgtcgggcgtaaaccttgagaatggattaatgctccgcaagggagccggtgaggcaatcagagaatttgtagtgtctaaaaacggtaagattccggccgatttggatgggattgtggaaaatatatcaaagctgggcggaacaccgcttaccgtctgcgcagataaccggatctacggcgtaatctatctgaaagacacagtgaagccggggctggccgaacggttcgccagactcagggaaattggcattaagacgattatgtgtacaggagacaatccgctgacggcggctacgattgcgaaagaggccggagtggacggtttcatagcagagtgcaagccggaagacaagatcacggaaatcaaaaaagaacaggctcaggggaaaatcgttgccatgaccggcgacggaacgaatgatgctccggccctggctcaggccgacgtgggaatcgccatgaattccggtacccaggcggcaaaagaggcggcaaatatggtcgacctggactcggatcctactaaaatcctggaagtggtcgaaatcggaaagcagcttttaatcacaagaggctcccttaccacattttccattgcaaacgatattgcgaaatattttgcaattattccggccatgttccagctggtgattccgcagatgaacatgctgaatattatgaagctttcaacgccgtacagtgcaattttgtcggctctgatatttaatgcaatcattatccccggcctgattccaatcgcgatgaaaggtgtaaaatataagccgatgcgttcggagagaatgctgcttaaaaacatgggaatttacggcgccggcggtgtaattgtaccgtttgtgggaatcaagctgatagatatgctcgcggctcccctgcttgcagcgttcggcctgtaggatgaagggaatgaagcatgtcgaacacatcatatgccggaactgaaaatgccgggtaagaaaacagaaggagacggttatgaaattatttatgaaatatttaaagaatgcagtaaagtgtacggtagtgctgggcgtcctgtgtacggtcatatatccggcagcgctgacactggccgggcaggcgctctttcccaaacaggcgaacggcagcatggttatggctgtcatagacggtgaggaacgcgcggtcggttcgaaatatgtgggacagcagtttgaggatccccggtttttccacggcaggatttcatcagtcaattataactgctatacacaggaggaaaaggaggacggcagctatggcggtgtcgcatccggttcatttaactatggtaattccaatcctgatttaaaaacaagggtggaagcagatatggctgcctggatggaagcgcacccggacgtaaaacaggaggatataccgtcggatttgctgacggcgtccggatccgggctggatcctcatatctcggtccagggagcccgggtgcaggtcggtgaaatagcaaaagcatccggtctgacggaggaagaactgaatgccataatagacaacaatacgcaaaagaaagcgcttggaattttcggtgaggaagcagtcaatgttctgggatgcaacctggagattgcaaaccggctcggaatactcaccctgaagtaaaacaaatatggtaaaaggcacattggcggccattgcgccattaagcagcaggaaagaagttactgttcacaccccgccaaaaagcggcgttctgcgaataataacacgcttcgcgatgtacagaaacggcaaaaagcgccgtttcgcgccgtaaaactcgggattttcgtgcaaaacacgcactaaaacacctcgcggaacacaaccgcgtgaacagtaacagaaagaagcctccggaaaaatctgtccggaagctttcttttttttcatagccatctgtgttaaaataatgacggaggaaaagccgcaatagaaatctttatacaatcttaatgccgcggggcgtttccttatacggctttaaataataaattgatatacttttcatagattgaggtgattttaatggaagagcgcagaagcagcccggaggagtttttacgccggtgtgaaaatgagaaccagtcaaagggccgggggagtctgaaaatatttttcggatatgcggccggggtaggaaagacttattctatgctgaaagccgctcacgcggcaagaaggcggggaatcgacgtggtggccggttatgtggaaccgcatgcgcgtccacagacctcccaactgctgaacggtctggagatgattcccgcaaaggagatccggcatgggaatgtggttttgcacgaatttgatctcgacggcgccatagcgagaaagccgcagctgattctcgtcgatgaactggcgcataccaatggaaaaggatgccgccatcaaaagcggtaccaggatataaatgagctgcttaacaatgggattgatgtttacacgacggtaaatgtacagcatatagaaagcctgaacgatctggtcgcttctattacgggaattacggtgagggagagaatcccggattccgttttcgataacgcggatcaggtggagcttgtggatattgaaccgcgggagctgattgagcgtctgcaggaaggcaaaatatatcgtaaaccccaggcggaaaaagcccttggcaattttttttcagtccagaatctcgttgcgctgcgtgagatcgcgctccggcgctgcgcggaccgggtaaaccggatgtcggaactgaccggaggacggtctaaccgcagctttacggaagagcatattctcgtctgcctgtccggttctccgaccaatgcaaaaataatcaggacggcagcgcgcatggccggtgcatttaaggggagctttaccgcagtatttgtggagacgccggattttgcctctgattcggatgagaataaagagcggctcaggcagaacacccggctggcggaacagcttggggctacgatagaaaccgtgtacggggatgatattgcttttcagatagcggaatttgcccgcctttccggaatatcaaagattgttctgggcaggagcagcacccggcgcagcttcttgggaccgccgcctctgaccgagagaattacaagactctctccaaacctggacatttatattattcctgatcagaactcccgtccttacagggccggagcacgaggttctaaccgccggatattaaatacggccgatctgattaaaagtgtttcagtattggcggcggcgactttgatttgctgcatattcgactgcctgggactcagcgaggccaacattataaccatatatattctgggtgtgctggtgacggcagtaatcacccggcaccggatatacagcctgacaagctcggttatctgcgtgctgctctttaatttcctgtttaccgaaccgagatttacgctgaatgcctatgatccgggatatctggctacctttccgattatgctgattgcggcgtttctcaccagctcgcttgccgtgaaaatccagcgtcaggcgcgtcaggctgccgagacggcgtaccggaccaaggtgctgtttgatacgaatcagtccctgagcaatgagaaagacatgacaggaatgataactgttacatgcaaccagcttacaaagctgctcgaccgcgacattctgttttacagaatacaggatgacggactggcggcgcctcagctttttgccgtgaacagcggagagaatgtgtcggattacgcggatgacaatgaacgggccgttgcatcatgggtataccacaataataagcgcgcaggcgcgacaaccggaaccctgggcaatgccaaatgcctatatctgtcggtccggctggcgcaggaggtgtttggcgttgtggggattgcgatagacggcagaccgctgggcgcatttgaaaacagcataatgctctccattctgggagaatgtgcccttgcccttagaaatgataaggtatcgaaggagagcgcggccgctgcgctgcttgctaaaaatgaacagctccggtcaaatctgctccggtcgatttcccacgacctcaggacaccgctgacctctatatccggcaatgcgggtatccttctgtcaagtgaacagagtatagggaaggaaaagcgcaggaagctgtatgaagatatttatgacgattccctctggctgattaatctggtggaaaatttattgtcggtgacacggattgaggacggcacaatgaagctgaggctggcgacggagcttctcgacgaagtggtcggcgaggcgctgcgccatacggacaggcggaggtgtgagcataagattaagataaagcaggaagaagattttcttctcgtaaaagcagatgcaagacttatcatgcaggttatcataaatctcgtagataatgccattaaatacactcccccggttccgaggtggtaattgagacgaaaagggagggaaatctggctgttgtaacggtagcggacaacggtgacgggatatccgacgagtccaaggaacatatatttgatatgttttatacggcagctaccaaaattgccgacagccgccgcagcctcggcctcggcctggctctgtgcaagtccataattaccgctcatggcgggacgatttctgtagaggataatgtcccccacggagccgtgtttacatttacattaccgatggaggaggttaccctgcatgaataaaccattaattctggtagttgaagatgatgctgccgttaaaaatcttattactacaacgctggaaacccatcaataccgtttcaggaccgcatcgaccggagagacggctgttatggaggcggtttcccataatcccgatgtgattcttcttgatctgggtcttcccgatatggatggtatcgatattatacgcaaaatccgttcctggtccaaaactccgattatcgtgctcagcgccagaagcgaggacaccgataaaattgacgccctggacgccggcgcggatgattatctgacaaaacctttttccgtggaggaactgctggcgcggctgcgcgttaccttccggaggctgaacgatgccggagacagcgctgcggctccggcttccgtgtttaccaacggcgagatgcgcctcgattatgcggcgggcaccgttacgatgagcgggcaggaactgcaccttaccccgattgagtacaaactgctctgcctgcttgcaaagaatgtgggaaaggtgctgacgcatacgtatattacgaaaaaaatctggggtagcgcctgggacaatgacgtcgcctccctccgggtctttatggcaaccctgaggaaaaagattgagcctgatccctcaaatccgcagtatatccagacacatatcggagtgggatacaggatgttaaaggtgtgagctttaaggcgtaaatttaatcatgacataaaataatattccgaaagcatctttctgcggcagcttgtcccgacggggctgagcttcacaaagaggtgctttttgccgtccggaaacggcaggttcagttctcatcgccaatcgaggcacagaaacggcaaaaaacgccgtttccccgggatatatcagaaaacttgaaataaatcccgttattcagtataatgaatccatatctttacaactacagcagaacagcagaccgggcggatacggaggccgcataaatatggatcagacctttttactacagttgaaccggtggaacgaggaagaagagtatcagaaaattatagaagcggtggaagccctgccggaggaggagaagactccggtactgatcagtgagatggcctgtgcctataataatctggctgaagcggacgacagccgcctgtttgaaaaggcggcagagctgctggaatcggtggaagaggagctttcggccgatcacagatggaatttccgcatgggatatgcctgttattatctgaacagggaaaagaaggcaaaatattattttgaaaaagcgctggaagctcttccgggggatgaggatacactatattttataaaagaatgcgagcgctgtctggctctcccgatctcgatgaagccgttcaggcagagggtaaaagagggatgggattccttcctggccggagaggccggacttcgggaacagattgaacgaagagaacatggagaggaggtggcggcagctttaagccgtctgctcgcaccggcgttccggaatatctgcttcgagattgggttcaacggggaaaaatacgatttgatactgaccccggacggcgacagggcaaagattttaaaactcgtttattttaaagaccatgccccggaggaggtttttcatcactggaacattcagattggccggcagcctgccaaagaatttgaactgagtatgtacggccaaagtatcggcacgaaagacgcctttgtctgggtggaggaactggatgacgaccagattgggctgtccgtgttttgcgaaaagctgcttcctcttttggaagagaatgaagacagggcctattcactgatggcggttcttctcgatcaggcgattggtgaaattcctgcaatccgttatatcggttatatggatttactcaaagaacccaaggacggcggcgacgcgattctgcttgatgagctgaaaggatgcatagacggaaaacgggccgtcacgccggaaaatttgtgcggctggtatacctgctattcaatggaaccggatggacgggaagactggtttttgcgtgaagataccattgccggggtaacaacctgtccggaggcggtcggatgttatttccggggagatgaccggattatggaagaatttcatcaggatggcgcggtccccggctttttctactatccgctggaaggcattgagcgcggaacgattctggatatgcgggacagccttgaaaaagacatttccgacagagccggcgatgcggtgacgtttaccggcggcgctacggggacggattacggatatctggactttgcagcctgggacctggatcggctgcttaagtctgcaatggctgtttttaacgaaagaaagctggaagcagcattccattctttcagaagggatgtaagcggcgttgcattgagccggaagggagataaggaatgagtattggctttacatttaaggctaaaaccagaaaaatagatgcattgaaggaatcggttaaggagatggcggaggaatcgggctacggcctggctctcaatgaaaactggcttacggtgtctttttgtaccatgggagacttgtcaatggaatgggagcgtgaaagcgggctgcgtggacaatggcttattaccggcaattgctgttccacccctgcaggcgccggttttcatgcggcggcaatccggttcctggatgaactggggcagaaacgtctcagtgagcttctggtggatgatgagacagaatattataatcaccgtgattttgaacgcatgaagcgggaacatttttacccatggctgaatgccctgaagcggcactgcgcggagcggggaagcgggtacagtaatttctgcctctgctgggatatggagcagtatcagcccgaggaagtccccggcacggttataaccccgatgggacgattcaatatagaaaatatgataaagcagacagagaaaaatggcatttcctggctggcggaacgtttttttatctgggacaatgaggaaaaagacgctctttattaccgcaatacggcattgaattatttgtgggagcagtgctgttttgtcccttcacggcgaagctccgaggacagcgtgtgcaatcagatgattatagattctctggagcaggcggccgtactgaatcccgggcttccactgcctgtggacgcgtaccgggagatttgcagtctggcggacagggcgccttcgattaaagaagatgcaccaaagatggagtcggattatccggttggtttcagaaagagggaggtaacccactcttttggaacgctccggcttacacttccggggcggttaaaatatgagtgggaaacgtatggggacggagacggctgcaatatgtggcgggattcggcctcggattcgcctgtatggcgggtcagcggtttcaggctccgttccggaaatgcagaattcccggaggaatgcagtcaaaatgaaccggaagaatttgaaattccgggcggccgtgcccgtatcggctggattgaatatgaggaggacggacagactgccttccaggccgtttgcgatgttgtatcgggtccctcacagtatctgattacggccgcatatatgcataaagaagaaaaagatggaatctatgctcttatgaggaagctgaaaaccgtgccggataccccggctgtgacaaatacggagagctatgcgcagtgatttgattccggaagataatgtcgaaataaaaggcgaaataaaacagtataaaatgccggattataataacggcagaaaggtggtaacaatggaaaaagaagtgttgtggtcggacagaaggcggctctggtgcggtctgccctggacctttaccgtatacagtatgacggaggatcgtctttttatcaagcggggacttttcaatctgagagaagatgaggtgcgtctttaccgtatcaaggatttaggacttgagagaaatatgattcagcgcatgtttggtctgggaacgattcgggttgtttcaagtgattccagccttgggaattttgacctgacgaatgtgaagaacagttcagatgttaaagagcagctttcgaggctggtggaggaagaaagacagaggaaaaaggtttcttccagagaatttatcagctttgaggaggagaatgaaatggagatttaactgaggttggaggacgcgtccggaacggaccatgtccggtgtggtgaggggctggctgagtcttccgtcccgtgggaagttggttgtggagggggaatccggccggaatgaattgctgcggggaccgtttgcactctttggagtgcgcatcggagtgctaagctcgaaaagacctcgctaagcaccggcggactcccatgtcccctccgcaattgattccgcctacttccccggatcaggttatcgcagggacggaagactcaggcggaagttttcgcgacaccggatatggtccgtttccggacgctgattgtctctaaccttaaatggggaggaccctgtcgcggccactacgtgtttccgcaggcagataccaaatctagcgccttttataaaggcgcaatgaaggcatatcgtatttcccgtacacggtagcactgagtggccgcgacaaggtccgcccccgcacttaacgcgtgagacattcagcggccgcaggccagtggacggggccaatccccccggcggagtctttcgtcccggcgaaaacctggccttggggcggaggggaagataaagtctgcggatgccgcctaaatccatcgctgattactgtgaaactttaacttctgggaagccaaaaaagcgcagacttccccatcaacctttttgacgtttattttgaactcagctaacaggttcaggcggcaactaccggaacctcccacccaagcgcttttaacttctttaggtacgcattaattttacgttccatgttgaattggttgtaataatcagcacccagatctttgaaaacaactccatccttgagtatgtgatagatggctataagcatggaatgggcaactgcaacataagcccgtttttttccacggtgggaactgattctcatgaactgcgcataaaagtacgaatttttatttcttgtagcggaatgcgcacagactaccagggttgaacgtaaaagagcattcccttttcgcatttttccggtcttcctcttttgggcactctcgttattgccgggacatagtcctgcccatgcagcaagatgaccggccgttggaaaacgactcatgtctgtaccaatcaccgaaataatggcctgggaactgttttttccgataccagttacatcctggattgcttgtgtcgcttgtttttcttccggtttcataaagttatcaatctcatcttccagattgttgatatgaacattgagttcatccagatgggacagcagctctttcatcattcgacgttgtaatggggtcatgacaccatttaaatcatcgataatctgttccttgctggctttgagattgtgggcaatgattttctgtttatacatttcatcatactttgcttcgtcgaagaattctccggtgagaaggtattccagaatgttgcgcgcactcatacagttgatgtcagatacagtaccggacagctttatgttggcaccctccagcatcttttggagtcggttcaattcccgggtgcgttcactcacgaggcttttccggtagcggaccagttcccttaactccctctgctgtttatccgggatataactggcttttaataatccgtgctgaagaagctccgcaatccattccgcatcctttgtatcggttttccgccccgggactgctttcatatggctggcattcaccaccatagcctttagttcagaagactcgaggatgttatacagaggcttccaataggacgctgtgctttccattgcgaccatttcacagccaccgttctgaagccagttagctaattcaagaagctctctggttgttgcaccaaagttccgtaactcctgcttgctgccttttctaaagcaggcgacgatgagctttttgtgcacgtcaataccacaacatttgtcgtaaactttatccatatggttacctccaaaataaaatttacggcacggtactctgtctattattattttactgtacgtccttctgccgcaagcggctggacagatggtggtgcaaatgagagtacctaaaatcagtttagcgaacgggctacaggcccaaattagtgccgatttttgccgttaatgtcagtataagctcaatcaacggcaatttcaatcacctgccgccctcgcagtttcatttatggtggtgccgaatcagaggcatggggtttagcgaggtcctgtcgagcttagcagcgcgatgcatttcacagagcgggagtgtgctccgcagactttatcttcgcccgcagccccaaacaacgacaatcttcctctgggacgaaagactcataaaaccaccccaccaccccgtccgctggccgtaccggcggcgtcctcatctgcttaactaaatctccaataaatgaaaaataatactagtaaacattcttattatctgctataatgtctttaaatataaggaaagttcaatctaaagtcaattataggaggataaagaatgaatatactgaccgggattttaatcccgtttatcggtaccacggcgggggcagcctgcgtgttttttctaaaggatcagctcaggccggtggtgcagaaaacactgcttggttttgcatccggcgtgatggtggcggcttcggtgtggtcgctgctgataccggctatgaacatgtcggaaggtatggggagactcgctttcgttccgtctgcagtcggctttctgtttggtattgcatttttgctgacaatggacaaactgattcctcatctgcacctgaacagcgagaaaccggaaggaactaagagcagtctgcagaagaccacaatgctggttttggctgtgacgcttcataacataccggaaggaatggccgttggtgtagtatttgcaggcctgctggctgaaaacagcggtgttacgctggcgggtgccctggcattgtcaatcggtatcgcgatacaaaactttccggagggagccattatttcgctgcccctgaaaagcgaaggaggaagcagccgcccgaaggctttctttctcgggatgctctcgggcattgtggagccgataggcgcgctcctgacaatagccatgtaccgtgtcattgtaccggctcttccctatctgctggcctttgcggcaggcgccatgatttatgtcgtcgtcgaggaactgataccggaatcggccgagggagaacactctaatatggggacgattggtttcgccgccggatttgtaattatgatgatcctggatgtggcccttggataacttgtgaagagtaacgtatcagaatcacgcgggcatcataaagtaaagtaagaaaagaaccggaggactgccatggcaacggtcagtctctgtatgatagtaaaaaatgaggaaaaggtgctgggacgctgtctggactctgcaaaagagatagcagacgagataatcattgtagatacaggctccaccgaccgtacaaaggagatagcggcagaatatacagagaaaatctatgatttcaagtggaacgacgatttttccgcagcgagaaacgaatcattcagaaaggcaacgaaggattactgtatgtggctggacgcggatgacgtgataccggaacgcgaacagcaaaagataaagaaactgaaagaacaactgacgccggatgtttccgcggtcatgatgaagtatgtaactgcttttgatgacacaggaaaaccggcgttcctttttgacagggagaggctgcttaagaacggagacggctatctgtggggaggccgcgtgcatgaggcggttgcggtgaggggaaaggtactctattcagatgcggtgattgaacaccactccataaagaaggaatactcagacagaaatttaagaatctatgaaagaatgatagaagagggggaagaactggaaccgcgccaccagttctattacggccgtgaactttattatcacgggaggaatgaggatgcggtcagagtctttgaaacttttcttagggaccgggaaaagggggcctggcttgaaaacctggtagatgcctgccggttctgcgcactgtgcttttacaggatggggaaaagggaggaggcgcttgaaaagctgttttggacgttctcttatgatgtgccgcggcctcagatatgctgcgatatcggaaaacatttcctggatgaaaatcgcttaaaggaggcggagttctggtaccgtcaggcaatgcagacatcgtatgaaccaatccccgggcttttgtggaaccggagtacagagagtttattccggcaatacaactggctgtctgcctggatcgtcaggggaaatacgtggaggcagccagatataatgaactggcttcctattacaaaccggattcggaggcagtcaaacagaaccgcatatattttgaaggcttgaaataatttcaggggtttttacccaataacttaattgggtggtttgtgtaatcgaagcgggcgcagctggacgaagtttgcagcttgtaagggatatatttccctctgttcactgcaacgtcgtccccctgtgccagggacatagcgttcagcctggcttttctaaattccatagactgttttccattggaacgtaatcgtagccccaaatctgttggcaaagctgttactgtgtaatcactcggccaggattggccgccagcagataattatgttctttgtacaattccactaatgcttccggtatgtcagatgtcaaacggataaaaacgttatatttcaaacattcccgctgcgcgtcattgaatttatcattatcacagcctaccgccagtccccatcttttcatagctgcctcctttccaagatgtatgcaggaaaaccgccgtcgcctgatggcggttttccttaataactgatgtttaggtataatgaaaaatcaagattctttccatgccccgtctggtccgacctcatagccgtcaatctttgtattgatcgccatagagccgtccgcgtagagatagtaccacttgccgtccacctgcttccagccggtgacaggcttgccgttctcgtaatataaccattggcccgcgtcgttctgcgtccagccctgggccgtggccaagtcgatgaccagctccacataacggtggaggactgcggcggcctcggcacgggtggcggtgccggtggggtcaaatttgttgctatccttgccgttgataattcccgccatctgcatggttttcacggcatctttcgcccagcttgcgatgttggcgttgtccgcaaaggtcacggcctcgcgggttttcggaacattgtagcccagcgccttagcatagtttgccatgatgaccgccatctcctgacgggtcacggcgctgtccggggcgaaggtggtagcggtggtgccgctgacgatgcccttttccgccgcccaattcacatagggcgcgtagtaggcgtccgtttttacatcggtgaatttacctgtcttgtaacttgccgggtcgataccggccagcctgcccagcgccgtgacgaacatcccacgggtcatgccgatattgggactgaactggttgttcccggtgccggagagcaggccacgggccgccacgaagtcgatgtcggccttcgcccaatggtttgcggtgtcggtgaacaccggcgcatcggccttgtaacccacgccgtagaccgagaaatgcccggttctggcgatcaaggcttttgtgttcggggcatagctggaatcggtcaggtaggtcacgccgcccttgtcgtccacatagaccatgcagagcttcccggcgtcctcgcccttttgcggggtgtaggggatggcgatagccgccgagccgccgccgaaattgctgaccggcttgccgccgctttgcagcgtaaagatgaacaccgggcgattgccgatggcgttctgtgccgccgccgacaggatattcgccgccaccggcattgcggaaacggtaatcgcgccgcctgccacagcctgcgccgctttcagcgcggcgaggtcgagagtgatggtcgctgcgtcgcctttgatccgcacctccgtaacgccagctttgatgagggcgtccaccgattgtctggtcagagtcgccatgatgtcgtttgcgcccctcgtcgtggtggcgtcaatggtgacggaaacgccgtttttctctgtcccggtctttttcgccgcgtcctgcgccgctttgatggcgtcggtgacggacttttcaggcacagtgacggtagccttgccgctttcgtccacagtaggcgtcaccttggtttcggcgttgattgccgtatccggcttaccggggtcgggaggggtaacggtaggtgtggagccgccgcccgaggacgaaccgcccccaccgccgccagaaccgccgccgctggaataggtagaaacgcttacggtgcagctggcggtatagccgccgtccgtggtagtgactgtgatggtagctgttccgttgcccactgccgtaaccttgccgctctggtcaacggttgccacagctgtgttgccgcttgcccacgtcattgttttgtcggtggcgtctgccggagaaaccgtggcagtgagagcagcggtgtttggtgtggtgttgctgtagagggaaaggctcgacctgttcagtgttaccccggtgaccgccgttgtacctgccgggatgctctcataggcagccgttgcgttcaccgcctgtgctggcatggtgaattttgcggtttgactggtcttgcttgtgccctctgcaaaggtgacctctggggaaatgctccactccttgaaccgctggccgtccggggccgggttcgccgtgatggtgacggttgcgccctcggcatagctgccgctgcctgtgccgcttgtgacggtcagagcgtaggcggcgccggagggcgggggtgtgaagctaccagtccctgtcgggtttgctcccgtatatgtgctgcccgcatggttggtgatcgtgccgttgttcacgattgagccgctgttcacaatcgcgccgttgtttacgatagtcccggtattggtgacggtaagcgtgccgccttggggaacgataagggtgccgcccgcatttacggttatggtggttgctccgtcatcgacgtcggcgacgcccacattaccgcttatggtaaccttgcccgtaacggtaatggagccgccaccggcactgaaaacagccattgcgccgggattggcggtgattgtgccgccggccagcgttatactgcctccatacgtgaacaccgcagcattgccgttctcgctgccgccggtaattgtgccgccgttgatgatgacatcattgttagccgtaacagctttattgcttgtgcttgtgatggtactgccggcattgatggtgacagtttgcccggaaacaccatgtagttgcccgctgaccgtaccgcctgtgacgacgacgtcgctgaagcctgcaatcgccgaagccatagtcgtgccggtattgataatcgcgccggtgatttcgattgtgccgagttcgccggtcatgctaccgctgctttgaaccaacgcgccagagtctttgctgccggtatagcttgccgcccaatttacctttgcccccgcgccaaggttcagatgaaccggtcccgcgcctgtaacggtgccggttatcgtaaccgttgcgtttgcgggaatggcgagggtaccggtggcgttgtttgtgatggtaatggtgccgccgttggcaacattaagggatgcgccgtcgccgtcccatgtgtgcgccggggcgctgccgccgtctgtcacgctgaccccaatgttcttaaggacagccggatttttgacagagcgcgctatcacataaacgacagttcccgtctcatcctgggcaaccgtgagcagccctgtgtcgctgatggtggtgccagacgcataggtgccgccccaaagcgtccattctacgtcccgcagggactcggccacctccgttccgtccgcgcccttcaccttggcggcaaattgcagggttccgcccttggccacgctgaaattgtcggtctgtccgcctgcggagaccgcgatgctggcaatgtcgtatttttcaaaggcgccgttgccgttccaggtatagactcccgccgtcaagcccgtgtccgaggctgcttccgtggccgccgctacggtcacctggccgtttgccgtgagcgtctgccccggtcgatgaacttgcctgccacgcccgtgactttagcgccggcggagccgctgtgcagcagcgcaatcccgccggctcccgcgccgtctgtcagtgtgccgccgctttcgataacaagcttactgctggagcgcacttcaatgcccacgttccctcggcttccttttcccaccttgaccgtgccgccatttttgatggtcatgtttcctcgaagggaaatggcgataatgtcgaagtcctgaatatcaatctccccggaaacattgagggagccgttgacggtcaccaggtcctgcctgtcgggcacattcagcacaagccttgcgccggagccaatgtcggcatcggtcatctggaacccatatccgccggtcacctccacggtaatgtccttcaagcggagcatgctgctagaggaaccatataatgcatagccgctggaccgattgcacacaagagtgctgctggcctcgcccgcgccctggatggtcaaggtgtgggtacccatgttgatgccggtgctgccgtcaatggtgacggtttttccctccgcaacgctcagggtgtggctctcgcccaccgtaatggcgccgaggtcggtcagggtgatgtcctccgtcacgctgatggtggcgggagtggtattttccagcgccgttttgagcgcctcggcggtggtgatgtctttcgtattgggattctccattccggcgatgttcaccgtgatgaacggtatgtcccaaccggtcagtccctccgccagcgtgtaggcggcatcgtcccacaccggggtaaagtcgtaggtttcaaattctgtgttctcgtagtcactgccgtcggcgggttcccacgtcacggggatggccgcttcgccgtccacgccgtcgatggtcacggccagcgtctccggcaggccgatggccgccacggtggatttctccgtcacctcaatggtgtcaaggggcgcggagccgtcaaaccccgcaaagccggtgatggtctgcacaagggcattgtccgcaagcggcgggttctgttcgccgctatcctttgcacattccccgcacacaaaggcgcagggtgtcccggtcacagccgggatatagccgcagttctcgtcatgctcaccccccaggggccttctctgccggcttcgccgtcattcaccttgtgctggcagtccagctccttagtaatgcagccgctttcctcgctgcacatatgagtgcattcggtcggttttttcggcgtagcgtcagacggcgtggcatcgttatccgatacgctgtcctctgccggatagcactcgtccgaatgctcgtggacgcactccgtcacttccttgtagcagtcgtccgtgtgctcatgggtgcagggcgtttccggcgtcccctcgatgtagccgcactcatcggtgtgcgcctcgtgatgctcgcacaggccggacgcgccgatagtctggccgccctctgtcgcaaacaccgtgttcatccccgtcatgctgaacagcatggcgacggacaaaagtatggatagcgttcgtttccattgtcgtttcatctcaaaccctcctcgtgattcgtttcgtcttttttctcccgatcaatctccattgcgaaagttccacatattgctgcaataaaggcaagcatcgtcaggtacttgcaaactgctgtcagcgtcataaattcatttcctgccatatataacgcaagcacaatgattgttaagacggcagccaccgccagaactgtcggaaagcgccatgccttttttcctttatttccttttttactcaacctgttccacctccggtacgacagtatattcccatgcgtctttcagctccggcggtttcttcaatacctccacggattttgcctgcaccagatattcgctgccgtcattcatatggtgcagcaccagcagacggtattcgtccatggctttcgtcagttttttggcaagatgcggtgaaaagtcctccgccatcgcgcggctgttttgatagaccagccacgtctcggggtactccgtccgaagctccgccttggtgacttctcttgcccacacaatttttttacctacgcacttggggccgaattgggtgtaacacgcatccccaaacagcaccatgggatagctgcgcccggtcttatgcaggcgcagggctacaacgccgtgaaattcttcgatttcctgtgccagcgccaccagcgtgccgctatacagtgttttcttttgctctttgctcatgctctatcctcactttcgtctggtagggaacccgcagcaccaattcaactccctcaaactcatggggattgatggaaaatcttgggtaggtatcaaaggtcagcgtccagccgtcggttgtgacggagttgaaaatgtccacatccttcagcggcgcataccgtacctgattgagctgttccgccatattcagaatcagcaggctgccggaggtaagctccagcttcagccggtagtctggcagcggcgtcacccgtataatctccggtatcttttttcccttgtaacgacgcgccataaaatacctcctttctcagacggtcatgccggacggctgcacaatcgcctcgccccgttcaatccgaaatatcataggagacggtatgcgaagcgccagccgaaccgccgcgtccgaataaatggacaccttctccgcttcattgcctgtgtcaaaaaacagcgtccagccatcggtggtgacagaattgaaaataccaacatccgtcagcggaaagtaccgtatactgcccacgatatccgccatgttcagaatcagcagactgccggaggtaaattccagcttcagccggtagtccggcagcggcgtcacctgtctgatctctggtagctgttgctcttttgctccgtaggccacaaaaatcctcctttccctgttcatcgcttgtgatttttttgtttcaggtataaaaaatccgcaccttacagtttcattgtaaggtgcggaataaattttttatatgggccggtggccatttattttatgagttcatcaaaatctttgcctttcacaagctcacgggacgcaatgccaaactttcttaaaatcgcactcacatctttttttacggtcgaaagcgaaagatgaagtgcatccataatctccgggtttgttttgccaaccaccaacaatttgaggacatccttctcgcgtggggtcaattcctctgtttttgcactgacagccgcaataccttctcgcactctatgcgccagctccgctattttccccgcgcctcctgctcacagcagtcgggcagcagctttttaatcctctcgtagttttccgcaaagggcagatacatccgatccggcagcgccatttcaagcgcttcggccaaaagctgcgccgcctccacgcgtttgactccggcgtccaatgcctgcgccatgtagattttcatatacacctgcggcaggagattggggaagatggaggaaatccccatcacatagccgcccatgcccagcagttttttgtattcctttttttccagcagcatccgcccatagatgatgtgggcgaaaggctgggacatgataaccagccgtctgtcgtctattttcccctccgcaagccatggtgctacttcctccggttttcccagcagcagggagagatagccctttgccagatcataggtatagcggcacaaatcctcggtgttgcggtaagaacggtctcgcagggtcgcaaggctgtcctccaaaagctccctgtccccatgcagcagggcaagccttgccagcgtgaacacgccgcattgggcaatgctgttctggcgcttactgtcggcggtgaagatggcgcggtgacagagaatttcggcctcgtccgtctcgccccggtgcagatgtgcctctgcgcgcataatcagttcagccccggtgccgtgccctctggacagccggtagtaatacggcatacactcgtccatctgctctatttcttcgttaagctttccgctttcccgccagtacatatacagcaccgagggagaaccgaatgtccatgtgcttttgctgttgatgagtgtggccggaccgcccagcagcttaagcgccctgcggtggcgtccgctcatggcgtcgatgcggttatactccagaaaggacagcagaagttccagctcaccccgcatggcgtccttttcttcctccgaaacggagcattccgcaatgacgctttcaatctcgtccttctggcggagcagttcctcattctgcccaaggaaaaagagggtaaaggccagaggcaccagcgattttgggtagcggactttcatctcatgggtggtgtgctccataatatccagaatcatcggcgtggtggtttcgtcgatggcgtccgcgatgtcatagctggtgagcggcatggcatacagccgttcccatgctcccgcgtggtaatagaagcgcagggtattcatccggtcgcccgctttttcggccaggccgccgccctttaagtagatttccttctgccgttcttcgggcaggcaggtgaatttttcctccagcatcttttggagctgggtgtgcatggtgtagcaggaattttcacggtcataacggataaagaaacgcttctcccgcagacggttttccgtcccctccatcgttaagccggagaaagcctgcgcctgggaaagtgtgaacgtcgggaagatagacacttttagcagaaagtctttttcgtccccggaaagaccgcccagaatgttttctgcataagggccgtcatgcctccctgttcaaattctcccgttctgacaaaggcatccatctggatatacagggccatgacccagccgtccgtcaggcgcatgacttcttcaagctggacgcccgtgagtggaagcccggcctcccggtaataggcgtccgtatcctccctggaaaaggcaaacgcctcctcctgcaagagatacaagaggccgctccgtatcagaccgccccgctcctccttggaataggggtgggtcgccacaacgatatgcagcttttctccgccgtggccggacaggtatttcaaaaattcacagggacggtacagctcccatagctgaaagttgtccaaaagcagaaaggtttcacggccgcaggaaataccctgtatcgtccgggcaatctccggcatggtatcctcatcgggcattccgatgacgaaaagcttctctgcgctttccttgtcaaaggcggcaatcaagctgcagaaaaccttccatgcctccgccggggtttcggagtggaactcatgctggtgaagcggaattgcttccgggttgcgggtatcgaaaaaatgctggagcgcggttgatttcccgaagccggaatccgcttccagaagcgtcatgggataagacttgatattctccagcctttccatcagcgcctttgggtaatatttgatatcctgtttcagttgtcgggttcgtggcataatcgtatattccttcctgtgccgcaaagccgtaacaacatagtttctgttctgttgaagccttgtcagcttattgctttctttgcgttttattatactacacctcacccaaatacgacagtgaatcttgtgaaagtctaagggcgctctgcatgtgagcacacgaaaacaggctggacaaaattgtgtttgtccggccacgaaggagaggccgttctcaacacagaggggaacggagggccttgctgaacagctatcttgcaaaacacatttttttatgcaataataaaacagatgataaccagatctggaggaataatatggcaaaaacacagtatgatgcggacagtattaccgtcctggaaggcctggaggcggtccgcaaacgccccggtatgtatatcggaggtgtgggaacaaaaggcctcaatcatttaatatacgagatcgtggataactcggtcgatgaacatctggccggggagtgcaacgacatctgggtaacgctggaagcggacggctcctgtactgtccgcgacaacggcaggggaatcccggtggagatgcataaaaagggggtctcggcagagagaattgtactctctaccctgcacgcaggagggaaattcgacaataatgcttacaagacaagcggcggtcttcacggagtaggttcttccgtggtgaacgccctttccgagcatatggatgtgacggtctataagaacggccagatccaccatgacgcatatgagagagggatcccgaccgtaaagctggtggacggactgcttccggtgataggaaagaccagggagacaggtacgaagattaattttatgcccgacggagagatctttgaaaagacgcgttttaaggcggaatggctcaagagccgtctccatgagacagcctacctcaatcccagactttccatccattacgagaacaaaagagcgggagaagcggagaaaatcacatacagtgagccggaagggatactggcctatgtgaaggagctcaacagcacgaagacgccggtccatgagccgttttattttaaagggacatcagagaatatcgaagtggaggtagcattccagttcgtcgataccttcgaggaaaatgtactcggcttctgtaacaatatttttacacaggagggcggaacccaccttgtcggcttcaagacgcgcttcacaaccatgatcaacagctatgccagggagcttggaatcctgaaggagaaggattccaactttacgggtgcggacacgagaaacggaatgacggccgtgattgcggtaaaacaccctgatccgatttttgaaggccagacaaagacaaagctggccagcgccgactgcacgaaagctgtctttaatgtgacgggcgaggagttacagctttattttgaccggaacgtcgaggtcttaaaggcggtgatcgcctgtgcggaaaaatctgctaaaatcaggaaggcggaggaaaaagccaagacaaatatgctgacaaagtcgaaattttcctttgacagcaacggcaagctggccaattgcgaaagccgggatgcggagaaatgcgaaattttcatcgtcgagggagattcggccggcggttccgccaagatgggaagaaaccggcagtaccaggccatccttccgatccgcggaaagattctgaacgtggagaaagccacaatggacaaggttctggccaacgctgagattaagacgatgatcaataccttcggctgcggcttttccgaaggatacggcaatgacttcgatatcacgaagctccgctataataaaatcatactgatgacggatgccgatgtggacggcagccatattgatacgctgcttctcaccttcctgtaccgttttatgcccgagcttatcagcaacggacatgtttatatcgcaatgcccccgctgtttaaggtaatcccgaagaagggcaaggaagagtacctctacgatgagaaagccctggagaagtacagaaagaaccataccggcgatttcaccctccagagatacaagggccttggagagatggatgcggaacagctctgggagacgaccttaaatccggagaaccggattttgaagcgggtggagattgaagatgccaggatggcttcggagattacggagatgctgatgggaagcgaagtgccgcccagacgccagtttatctatgagcatgccgatgaggcggagatagatgcataagcatcctgcgggaagctgcgccttacgatacccggcgcatgaaaacgcctcacaaaatattacccgcggcaggaaacaagtcagaaacttaagattgcaggagatagaataaagaatggctgagaaaattatcacaacggaatactcggaagagatgcagcgcagttacatgaattattccatgagcgtcattacggccagggcgattcccgatgccagggacggccttaaacccgtgcagcgccgtgtgctttatgatatgagcgagctgcgcctcggttccgacaagccccataggaagtcggcccgtattgtcggcgatacgatgggtaaatatcatccccacggagacagttccatctatgagacgctggtcgtcatgtcccaggtctttaagaaaggaatgcctctcgtaaacgggcacggaaacttcggttccattgaggggacggggctgccgccatgcggtacacggaagcaaggcttgagaaatttgcggaggaagtctatttaaaggatttggacaagaccgtaccgtttgtcccgaattatgatgagacggagaaggagccggaggttctgccggtccgcgtgcccaacctgctgatcaacggcgcggagggaattgcggtaggaatgagtaccagcattccgccccacaatctgggggaggtcgtggatacagttatggcttatatcgataatccggaatgcacgacaaaagaactgctcgatatactccatggccctgatttcccgacaggcgggattatcgccaacaagagcgatctgctgaatatttatgatacgggaagcggacggatcaagctgcgcgccaagctggaggtggaattaggcaagcggcgtgtggacaaggacaagctgatcatatcggagattccttacacgatgataggtgcaggcattaataaatgtcttgtcgatattgcggatttggtggagtcgaagaaactcaccgatgtggtggatatctcgaaccagtccaacaaagagggaatccgcattgttctggaattaaagaaagatgccgatatcgaaaagattaaaaatatcctttataaaaaaacgaagctggaggataccttcggcgtcaatatgctggcaattgccggcggccgcccggagactcttacgttaaaaggaattcttaaaaattacctggatttccagtatgagaataatacgcgcaaatacaatgtgcttctggaaaaagagctggaaaagaaggagatccgggaaggtttaatcaaggcctgtgatgtgattgacctgattatcgccatactcagaggctccaaaaatttaaaggacgcaaaggcctgcctgatggagggagatatttccaacatccatttcaagacgccgggctttgacgaggacgccaggaagctgcgcttcacggaaaagcaggcgtccgcgattctggaaatgcgtctctataagctgattggacttgaaattctggctctggagaaggaatataaggaaactctgaggaaaataaaggaatacgaaaagatcctgtccagcaagctgacgatggacgatgtgatcaagaaagacctggaagagattaaagcggaatttgccacgccgaggagaacgctgattgaggacggcaaggaggctgtctacgatgagacggcggttgagatccgggaggtcgtctttgtcatggacaagtttggttacggcaagctggtggacagggcgacctacgacagaaaccaggagacgatagaaggggagaatccccatgtcatcccctgcctgaataccgataaaatctgtctctttacggacacgggacttcttcaccaggtgaaggcttctgatattccatatggaaaaatgagggataaaggaacaccggtcgataacctctgtaaatttgacgggacaaaggaacgcccgatattcattatcaatgcttcggccctggtgggacgccgtctgctgtttgcaacaaagggagctatggtcaaactggttccgggtgaagaatttgagacaaataacaggatggttgccgctacaaagctccaggacggcgacatggttgtcagcatccagctgacagacggcaggacggaggccgttctccagaccacaaacggcgtattcctccgctttgatctggaagaaatttccacactcaagaagaattccaagggcgtcaggggaattaagctgggccgcggagaagaactggaacaggtttatctgctgggtacagacagtgagcagaccgttatgtacaaagaaaaacaggtgcatctgaaccgtttgaagataggaaagagagacgggaaagggagtaaagtgcggctttaaaaccgccttggcagataccggggctgatgcggtaattgactttttttcataatcatgataaatttattaaataatatagttaatacatttgttggcttctgccggaaagtgacagaatggataaacatgatatttatataaaaattgagaatgaaattcagaagaataaagatggattgacagagctgggacgggagctgtttaatcacccggagcctggttttaaagaagtggaatcgaataagattctcacttcttttttgcgtgagaatggaatttactgccgctccgatatctgtctgacagggattcgggcggagattgggaatggggaaggataccacattgcgctggtggcggatatggacgcgctgattgtggacgacggggagaagcgttacccctgccattcctgcggacacagcatccaaaccgccgtcatggcctatgtgctgaaaatgttgaatgatatgaagctctgcggggagacgggaggacgggtcaccttcatcgccgcgcctgccgaggagtttattgagtttgaatacaggcagaagctgagagcggaagggaagattaagtatttctccggaaagcagaacatgatagaacaggggatatttgacgatgtggactgcgtgatttccatgcatgtgaacggggagaccggcacattgttcgacgtcggctccacattggccggattcatggtgaaaaaggctgtttttaccggagccgccgctcattccggagctgccgcccatatgggaaaaaatgcgctccatggggccagtctctgcatggatgccattgcctatatgaaagatcagtttcccaaggaggccggactccagatccatccggttatcacacagtgcggaggcagcgtcaatattattcccgataaggcggttctcgagagctatgtcagggcaaatacgctggaggagcttttggaggcaggagagaagtttgacctctgtgccgtccactctgccggggccttaggccttggctgccggattgaaaaccagacgggatatatgccgcttcagcagtcaagtgaaataaacgaaatcatttaccgccatatgcaggagatttgcccggacgacaggattgtgaagaatgtggtttcgggggcgtccggcgatgtcggggatttaggttatctgcttccgacggtgcagtttggattttcaggaataaagggccggattcacagcagcgaatttgagattacagatgaagagaatgtctatctccacacagcaaagatagtcatgaaaacagtatatgatttgctgtcctgtccgcagcttcagattaaaaataaagatttttctgaaagaaaagagttttatttgaaaaactggttatacatagaacaggagtaacagttcatgttgcctgaactgttatgaacagtagcattaatccggaaaaaacggcgttcagaatatcagcttacggcagaccggacagtaagggcgggaccgtttcatctgaaacgcgttttctacaataaatatgattatattctaaatatcaggaggaagtgactatgtcagaacacaacataccaacaccgcatattgcagcacaggcaggagaaattgcggagacaatccttttaccgggagatccgcttcgggcaaaatatattgcagataattttctgaccgatgttaaacagtttaatgcaaccagaaatatgtttggttacacaggctcttataaggggaaacgcgtatcagtcatgggaacgggaatggggtgtccgtctatcggcatctattcctatgagctgattcatttttacggatgcaagaatctgatccgtgtcggcacggcgggcgcgctccgtccggaggtgaaggtccgcgacatggtattcggcatgggagcctgcaccacatccaattttgtgaaacagttccgccttccgggcgattattcctgcatctgcagttacgagcttcttgcaaaagcggtaaaagcagcggaggagaaaggacttcattatcatgtcggcaatatcttaagctcagatatgttctataatccggagcttcctccggtgggaaccacctgggataagatgggcgtgctggcggtagagatggaggcggcggccctttacagcaacgcggcatacgcaggcgtcaacgctctctgtatcctgactgtctcagattccgcggtgacaggcgaggctacgaccgccgaggagcggcagacctcatttaccagcatgatggaagttgctctggaacttgcataagtgatattaggagtgccggacagacagcggcactttacagcgaaagaataaggggaatgactatggcagaggaaattttacgggtggaagacctgactaaaatttatccgggcggcgttctggccaactataatattaatttcagcgtagacaaaggagaaatccatgcgctggtaggtgaaaacggagccggaaagtccactctgatgaagatgctgtttggaattgaggaaattacaagcggcaaagtattccttcatggacaggaaatgcattttcattccagtaaggatgcaatcgaacacggaatcggaatggtccatcagcatatgatgctggtgccttcgctgaccgttgcggagaatctggtactgggaatcgagcagaaaaagggaatgttcctggatcagaagaaagcagtggaagagacagagaaaatttcaaagaaatataatcttcatgtggatgccacaaggagagtccgtgacatctccatcggtatgaagcagaagctggagatattaaaaaccatgtaccgcggggcaaagattataatcctggacgagccgaccgccgttctggcgccgcaggagacggaggaactgtttgaacagcttctgaacctcaagaaagaaggctatacgatcattttcatctcccataagctccatgaggtcaaatatctctgtgacaggctgaccgtgcttaaggacggccggtccattggaacttataaggtggaggatgtgacgccggaagaaatttcacgactgatggtggggcgcgacgtcaaactggagtatgataagacgccgcagcaattcggcaataagatattgacggtggaaaacctgtgctataccgataaattcggcacgaaaaaactggacaacctgaatttctccctgaaacagggagaagtgctgggaattgccggtatcgaaggcaacggccagaaagaggccatggagatcctgaccggcaatatgaaggcggagagcggcgccattcattaccgcggggaagatctctgccgtaagactatccgggaaaacagaaggatgggaatcgcccatgtgccggaagaccgcaacttaaacggcagcgcgccggagatgagcgtgcgtgataacttaattgccgcaagtctcgacaagctgtccaaaggaacgattctcgacaggaaagcgattgaggactattgcgaggcctgtgtcgaagacttcagggttaagacatccagcctcgatatcagcatcaagagcctctcgggaggaaatatccagaaggccattgtggccagggaatttacggcaggcgccgacatcatcatcctgaaccagccgacacggggcgtggacgtcggagccatggagtttattcacaagaagatactggaaatgcgggatgaaaagaaatccctgattttagtaagcgccgacctggcagagttaaaggcactgagcgatcgcattattgtattccatcagggaacgattgcgggtgtccttgacgatgtccccaatacgacggaagaagaacttggtttatatatgctgggacttaagtctgattccgaagagaagcttaaggaggcgtaagatgaacaggaagaaaaagtttgaatggtatggagtgatccgcgtgacggcggccattctgatcgctcttctgattgcggcggcgattatttttgcagtggcggacgatcccgggacagcgctttacagattcctgctgggaccattttcgacaaaaagaaacttctttaatgtaattgaaacaatgataccgctggtattctgcggacttgccatcaacgtcatgcataagagcggcctgttctccatggtggccgacagctccttctattttgcgggcgtcatggcggcgacgctggcaatcgcatgtcctatgccgaatatcctgcatcagatcgtaatcctggctgttgccatggcagtgggaggcgtgattggcattattccggttctgattaagagaaagacgggagccaacgaactcgttatctctctgatgatgaactatatcttctttaatttcggttactggctgatccggaaatttttcctggatacgtccaacggctcgttctccatcggtttccagccgacggcgacactgggcaggatgctgaaagggaccaatacacactatggtctgctcatcatgatcgctgctgtcattatcatgtggattctgatggataaatcgaaattcggccgtgaactgaaaattacaggctccaatgaaaactttgccaaatatgcaggtatcaagattggcggagtcgtaatcggctcccagttaatcggcggaatgctggccggacttggcggcggcgtcgagatgatcggcatgtacaaaaagttccagtggattacggctcagacgtacgtatgggacggtattctgatcaacctgctggcaggcacaaagccgcttatgattccggtttccgcctttttcatttcctatatccgaatcggcgcccttgtaatgtccagaggcgggatgtggactcagagattgtatccatcatccagggcatcatgatcatgctgattgcctccgaacggttcctgtataagatgaagaagaataaagaagaaagagaagcgctgcagaaccagacggtggaagcagaaggcgcgaactaaggagggggaaaaatggactttttaacaaatcttgatttttggtttaccgttctccgagctacgacgccggttctctttgccacgatggctgcgctcatcgccagccgttccggcatgctcaacctgggactggaaggagcgatgacaattgcagcgctctgcggagtattgggaagcggctttaccgggagccttcttgtcggcgctgtctgcggccttgcggccggaatcggttttaccatgcttctggcctactttgtccagcaccttaaggcaaatcaggtaatctccggtgtggccctcaatctggcggccagcgggggctctgttttctgcctgtattccataacgggagacaagaatgccagcaactctctggcttcgtcggcattcccggccgtacagattccggtcattaaggatataccgggtctgggagatgtattatccggacataacagtttgacttatgtcgcatttattgttacaatcgtcatgttcattatgctgaaaaagacgtccttcggcgttcatatcagggccgtgggcgagtcggaggaggcagcacgctccgtcggtatcaatgtgaaacgtgtgcgttaccaggctatgctgatcagcggcactctggcatcccttggcggaatgtatctgtccatgggatatgtgaaccgttttacatcaggtatggtggcgggacgcggctatattgcacttgcaaccaacgcgatggcggccggcaatgcgctgatgggaatggtcagctctatcctgtacggtttcggcagcggtatctccatctatcttcagaataacaatgtggatccgtacctgattacgattattccatacgcatccatcattgtcttctatgttttgttcagcctttattacaaggtcaggagaaagacggaggattccctgtaggcgcagaaaagcccgattacggaagaaggaatttcctgttttaactattgttcgttatctcttgggagctgtctccctttagatatagaaaaccatttatttatacgatctaaggaggaacattatgagaaaatcattcaaaaaagcagcagccatcgttctgactgcggctatggcattgtccatgactgcatgcggtggcggcaaagcggcggaagagacaaaagcggaagcaggcagtgaagctgcagagccggcagcagacggcgagacaaaagcggcagagaatgcaggcaacggcgagaaactgaaaatgacactctgcatcggccgtaagaacgacctttccttccagcagtcagcctatgaaggcgccatgagagtgcaggaggagatgggcgacaagtttgaagtcaatgtggttgagatgggcgacgacacgaccaagtggcaggcagctttctacgacgcggcggacagcggcgctgacatcattgttggaaccggtttccagaacaaagagaactttgagacaatcccgttagagtatccggataccaagttcatcctctttgaccaggatgttgactacagctcaggcgatttaggcaacgttttaaccgtattatttgattccaaccagtccggtttccttgcaggcgctgttgcagcatactacacaacaggcgagaacgctgccaacaccgataagacaatcggtttcgtaggcggaacggagagcacgacggttaacaacttccttgtaggttatgcagagggcgctaaatatgtggaccctgagacaaagatcctgacagcttatgtaggcgacttcatggatacggccaaggcaaaggatcttgccaacgcacagatttccgaaggcgccgacatcgttttccaggttgcaggcggtgcaggcaacggtgtaatcgaagctgcggctgagaaagacggcgtgatggctatcggtgtggacagtgatcagtacagaaccctggaaggctccaacttacaggcatccgttattacatccagcttaaagcttcttgacaacgcattatttaaaatctgctccgactatgtggaagatccttccaaggtaccgttcggaacgaccgtaacttacggccttaaggacaacgccgtaggtatcgtgttcaacgagaacctgacaaagagcattggtgaggagaatgtcgccaaagttaaggagattctcggaaagattcagagcggagagattaccgtatccgatgcggctgaattgacggcagatcagattaaagagattgtaaacaactaagaagaagctgctgcatcccggaggcgcattaaacggccggggtgcggctttttctatattcagacggaaggatggcggcattttgaggggaatcatagacagccacgcccacatctgcggcgatatcctgtatcccaggtgggaagaggtgattgccggagctaaggaagcggggattgaaaaaataatgattgtctgcacaggactttccgaggcggagagagcgattgagattgcaaagaaggaatcgatgtttgacgtcgcctgtgcattttatccaaatgacatactgaaggtaacagataaagattttatacggctggaggagctggttaagcgtccgcaggtgaaagcggtgggcgagattgggatggactattttccctatgagaagacagttccggccgatatacagagagacgctttcatcagacagattgagatggctaataacgtaaacaagccggtgttaatccatatgcggcttgcaacgaaagatacatgccgctatatgaaggaacatttaagggtgccgggaatcatgcactgctacagcggcggctttgaggcaatgcaggaatttctcgacatgggcatgtatatttctttttcgggaaatattacttttgaaccggatgatatcagcacacagagagctgtcagggaagttccgcttgaccggattctggtagaaaccgatgcaccctcccttacgcctgccccgatgcagggaagagataatgaaccgaaatatataacttatgtgatagagcatatctgccgggtgagaaatatcgaaaaagaagacctgatccgggcggcaggagagaactacagacgtctgatgggagaataaaatggaatttaatcatatggaataccgttatccctcacgccgtgaagctatatttgcgaagaacgggatggtatgcaccagccagccgcttgcggcccaggccggactggacatattaaaacagggcggcaacgcagtcgatgcggctgttgccacggcggcagccatgacggtgctggagccgacttccaacggaatcggcggagatgccttcgcgcttgtatggctggaacggaaaaaagaactgctcggattaaacgcaagtggtaaaacgccgcgtttgattaatgcggataaagtgaggaaatcgggctgcaaggagatgccggttcgcggatggctgccggtcatggtgccgggagcgccgtccgcatgggcagagatgaccgaaaaatacggctgcttaactttggaggagaacctggagccggctatccgctatgcaaaagaaggctatccggtaacgcccgtcatagccggactttggaatgcggcatttgaactgtttggcaaaatccgccgtgagggacaggatacggactggctggaaccatggtttcatcattttgccccggaaggccatgcccgaaggctggtgaaatttggaaatccggggatatggaggagacgctgaaaaagattgccggaaccggcgcccgtgatttttacataggggagctggcctgcaaaatcgatgagttttcccgcaggaccggcggatatctgagaaaagaagatctggaatgctattggtgtgaatgggtaaaaccaattcatattggctaccgggattatgaggtatgggaaataccgccgaacggggatggaattatcgctctgatggcgcttaatatattaaagaactttgaatttgagtcggacggcagggaaagcgccgaaacctgccacaggcagctggaggcaatgaagcttgcctttgccgacggcacgcggtatgtggcagacccgaagtccatgacagtgactgccgcagagctgttaagcggcagctatggacgaatgcgaagcggtctcattggcaagactgccggaacgccaaacgcaggagatccgagaagcggaggcaccatttatctttgcacggccgaccgggaggggaatatggtttcctttatccagagcaattttaacggattcggctccggcgtcgtcgtgccggggacgggaatatcccttcagaacagggggtgtgccttcactctggatggaaaatcagagaactgcctgggaccggaaaagaaagcgtttcatacgataattccgggtttcctgacaaaaggcggggaggcggtaggaccttttggcgtcatgggagcattcatgcagccccagggccatgtccaggttctgatgaatatgatagactttaagctgaatccgcaggaagctctggacgcaccgagatggcagtggattaaagataaaaaggtgcaggtggagccgctgtttccgaaagaactggcgaagcagctctcagccagaggccacgaggtggaggcggtggagagtgcggtaagcttcggccggggtgagatgatactgaaagacaaaaacggcgtttactgcggtgcggctgagccgagggcaggcggccatgtggcggcttggtaaatcagaaacttacgcaatgatttgagaaggagatagaacgatgattaaactggaacccaaaaataaaaaagcgcttttaaaaacggccctggggctggaaccggccgatctggcaatcaataactgccgtctggtcaatgtatttacaggggagatttatccggctgtcgtatatgtaaaaaatggatttatcgctcatgtggagacggagaagctggaagggccgtatggtgcccttgaaatttacgacggagaaggacggtacctgatcccgggcctcatcgattcccatatgcatatcgaaagctcgatgatgacgcccaggaattttgccagagtcgtcattcctcacggaactactacaataatccatgatccccatgagcttgccaatgtttacggtgtggatgctgttaaatacatgcatgacagtgcggacgatctcccgatgcgccaacttgtggatattccgagctgtgttccggctgtgccgggctgcgaaaatgccggagccgagttttttgccggggagatccgtgagctggcaaagcttaagcgcgtggtcggcctcgccgaggtgatggatttttacggagtgatgaacggtgacgaacggatgatggatattatcgaagcggcacaggagagcggcctttacctccagggccatgcccggggctgggcggcaggcagctttccgcttatctgtgcggcggtccgaatacctgccatgagacgaccaatggggaggaagctctcggtaagctgagggcaggcatgtatgtggatgcaagggaaagctccatcacaaagaacgtgaaagcaattgtggaggggattcagggaattcgcttctatgatacgctgaccctttgcagcgatgacagagagagtgacgatctgcttcatacgggccatctgaatgccgtggtcagaaaagcgattgagtgcggcatggatcctgtgctggcgatcaagagcgccacgatcaatacggccagggaaatcggcgtgagccatataggcgcagtagcgcccggatacaccgcggatatggtgctgacaaaagacatccatacgatgtgggccgacgccgtattctacggcggaaagctggttgcagagcatggaaaactgacggtggaaatcgaagaccgcgagtatgagatggagacaagaaattccatgaatgcggggaatgtgtcactggatgactttatcgtgaaagcacctgtggaaaatggtacggtgaaagtccatgtaatggagtaccacgatcttctccagagcatgacaagatgcgcggtggaagagctggaggtgaaggacaataaggtagtcctgggagagggaatggcctttgtagccgtcatcaaccgacatggaaaagggacaaaggctctgggaattgtcaaaaatttcggcagcagcgaaggcgccatcgcctccaccgtttcccatgactcccacaatctaaccatcgtctacttcaaaccggaggatgcactggctgccgcaaaggaactgattgcaaaaggcggaggcatgacggcggtaaaggacggcgtcgttctgaacacgctccgtctggaagtgggcggcctgatgaccaggctgaatgcggaggaactgacaaaagaagcagcgagaatgaaggaagtagagcgcggtctgggtctgactgcccaggaaaatcctcttcttcgcattgtttccctggcgcttccggttattcctgatgtaaaaatgtcggatttgggactcgtttccgtcgcggaacagaagattattccgttgttcacgtcataaattgtatgaatgtgcgcgaaagaaagacaaatgtattttctttgcggaaaaatattgatttttttaaagaattggtttaggatatacgttaatgctgcttatgtataacagttccggacagcttacggaactgtaaaacggcagcgcgcaggaatgcggcaatcccacgggcgtcccgaaccgggcggcaatatagggaaatagaaatccgggaatgaggagaatagagatggaaatgaagaagaaattacgtgtaggcgtcttaggtgcaactggtatggtaggacagcgttttattacgcttctggcagagcatccctggtatgaggttaccgcagtggcggcaagccccagatccgctgggagaacctatgaggaggcggtgggaggacgctggaagatgcagactccgatgccggaatccgttaagaacatggtagttatgaatgtcaacgaggtggagaaggtagccgaagccgttgatttcgtcttcagcgccgtcgatatgacgaaggaagagatcagagccattgaggacgcctatgcaaaggcggaaattccggtggtttccaataacagcgcccaccgctggacgccggatgttccgatggtggttccggagattaacccggaacactttggcgtaatcgaattccagaaaaagcgtcttggaacgacgagaggctttgttgctgtaaagccgaactgctcgattcaaagctatgctcctgttttaactgcgtggaaggaatttgaaccttatgaagtagtggctactacgtaccaggctatctccggtgcgggcaagacatttggtgactggccggaaatggtggagaatataattccgtatatcggcggcgaagaggaaaagagtgagcaggagccgttaagactctggggcgaaataaaagacggacagattgtaaaggcagaaggcccgttaatcacatgccagtgtatccgtgtgccggtattggacggacatacggccgccgtttttgtaaaattcaaaaagaacccgacgaaagaagagcttattgagaagcttgtgaatttcaaagggcttcctcaagagctggggctaccgagtgcgccgaagcagtttatccagtatctggaagaagataaccgtccccaggtaaaattggatgtgaattatgagaagggaatgggagtttccgtaggccggctgagagaagatacggtttacgactggaaattcgttggactgtcccataacacgctgagaggcgcggcaggcggagccgttctgtgtgcagagcttctgacggcccagggatatattcaggctaaataaggccggggactgaacggtaacactgtgaatagtaacaacagttttcatccggttaaggaggaatatattttatgtataaaaaggtaaagtttggtgaattggaagacggaagagaggtctttcagtataccctgacgaatcggaacggggtaacggcgtcttttctggatctgggcggaatttggtcgtccatgcttgtcccggatgccaacggccggctggacgacgtggtgctgggatatgacacgatcgaagcatgtctggtcaacggcggccatctgggcgagattgttggaagaaatgcaaacaggataggcagggcggaatttacgctgaatggcgttacatataaactggctgccaacaacggcccgaataatctgcacagcggtcctgacttctatcgtgacagaatatgggacactgagttatccgaaggggaaggggagagttccattacattttctcttataagtcccgacggagatcaggggtatcccggcaatgcaaggatttccgtcgtctataccctgactgatgagaacgaactgaaaatcaggtaccatatgatttgcgacagggacactgtcgcaaatatgacgaatcacagctattttaatctggccggacataatagcggcagcgcggtgaatcagtttgtgtggattgatgcggactgctttacaccgacagatgaggtgtccatcccatatggcagaatcagcccggttaaagatacgccgatggactttacgtccggaaagccgattggccgcgatattgatgaggattatgagcagcttaaatacggccatggctatgaccataactgggttctgaaccatgagcctggaaaactggctctttcggcaaaggcctgggacgaagccagcggccgtgtgatggaggtctatacggacctgccgggaatccagttttatacggccaattatctggagccggagataccgggcaaagagggcgtgatgtacggtccgcgccacggatactgttttgagacacagtattacccgaatgccatcaatactcctgattttccttccccggttttaaaggaaggaaaagaatataatactaccactatttacaaatttatgatagaataattaaatgtgagaagatggtaacggttcatgctgtcttaactgttacggaaaatggatacagggatgcagaaaaaagccttcggcaaaagctgcagccctgtatttttggtaacagttcagccatgatgcgttccgtgaggtgatttcgctgtttatcgcaaaatcccgggttttgcagcgcggagcggtggcaggccggggatatgaggtcttgaagagccgggagggtgaaatcgaaatggaagcgacaaagggaaaaatgaatgataaaacagtaaagctgcttgcgtcggccgggcttttactggtaacaattgtatggggaagcgcatttgtggtgatgaagaattccatggatgtgataaaacccacgtatcttttggcatacaggtttacgatcgccacggcaggccttattcttatattccggaagcaggtcaaatcaatgacatgggccgatatcaaatgcggcgccctgctggggattttcctgtttatcagctattatttccagacttatgggctgaagtttacgacggccagtaaaaatgcatttatcacaacgctgtacgtgatcatcgtgccgtttctgcactggttttttaacaaggtaaaaccgtcgggaaataatataacggcggcctgtattgcagtagtagggctggcgctcctttccctgaaaggagatctgaccgttaatttcggagatttcctgacattcatctgcggcttttgttttgcccttcatatggtgtttatcgaccgctatacgatgtgttacagtcctatcaagctgacggttgtgcagatggcctcctgtgccgtattcgcctggctggtggcggcagtttttgaaggtccgtgtgatctgagtgtctttacagaccggggaaccgtcgtatccgtcctgtaccttggcgtcatatcaagtatgctctgttttctccttcagacggtggggcagacgtatctcagcgcaagcacctcatcgatactgctgtcgtttgaatctgtattcggccttatcttctccgtcatcttcctgcaggagtcagttacggccaggatgctgctgggatgcgccctgatgtttgccgcagccattttagccgagcgcacgccgtctcagaagaaaaaggccaaaaaaaggaagagcgaagaaacggatgaagtctgatattattactatattaaaacagaatgtggggaactgaatggcaaaatcattatacatagcagaaaaaccgagtgtggccagagaatttgccgcagcccttaagattgcgggcagggcggcggacggctatattgaatcggagaatgcagtcgtaacctggtgtgtgggacatctcgttaccatgagttatccggaggcatacgacataaaatataagaggtggagtctccagacacttccttttcttccgaaagaatttaaatatcaggtaattgagagcgttgaaaagcagtttaaaatcgttagcgggcttctgaaccggaaagatgtggatacaatctatgtctgtaccgactccgggcgggagggtgagtacatttaccgcctggtggcgcagatggccgggattaaagataaagcacagaaaagggtctggattgactcccagaccgaggaggagattctccgcgggatacgggaggccaaggacctggaggagtatgataatctggcttcctcggcttatctgagggccaaggaagattatctgatgggaattaatttttccagggcgctcacgttaaaatacggcccctcgatttcaaattttatgcggacggacaggacggtggtctccgtcggccgcgttatgacatgcgttatggggatggcggtgcgccgggaaagagaaatcagagaatttgtaaaaaccccattctaccgcgtgataggaaccttcggaccggaggggattactatagacggtgagtggaaggccgtggagggatccagatattttaaccatccctgcctttataaagaaaacggtttcaaagagagaaaggatgcggaggagctgatagcctttctctcctctgccgagccgcgaaacggcactatcgcctcgattgagaagaagaaggagacgaaaaatccgcctcttttatacaacctggcagagcttcagaacgactgctccaagatgtttaagataagcccggaccagacgcttaaggctgttcaggagctttatgaaaaaaaacttgttacctatccgagaacggatgccagggtactttccacggcggtggcaaaggaaattcataagaatatcggcggcctgcaaaatttcggcccggcggccgaatatgccagagaggtgttggcctcaggctcttacaagactattgcaaagacgagatacgtcaatgataagcagataaccgatcactatgctattgtacccaccggacagggactgggtgctctcaggagcctgtcggagctgaattcaaagatataccaggtgattgtcagaagattcttaagtattttttatcctccggcaatttaccagaagtatacggtggacattgtcacacagaacgagcatttttttgccggattcaaggtactcagggagcagggctatctgaaggtggccgaggtgccgggtcagggccggaaaaagaatacaggcgctccggatgccggctcggacggcaatgtacttcctgccgagaagccgggagcggccggggatgtgattctggattcatccagtccggaatttattgaaatgctggataaactgaaaaagggtgcggtcgtttccctggatgccctgaatataaaagagggtgaaacgtcgcctccaaaacgatacacctccggttccatgattctggcgatggagaatgccggacagctgattgaagatgaagagctccgcgcacagatcaagggaagcgggatcggcaccagcgcaaccagagccgagattttaaagaagctatttaacatcaagtacttgtcactgaataacaagacacagataattacgccaacttgtctgggagaattgatttacgaggtggttaacgcttccattaagcagctgttaaatccggagctgaccgccagctgggagaaggggcttacctatgttgcagaaggcagcatcacttccgatgaatatatggaaaagctggagcggtttgtggccggccggacttataatgcggttcatatggcgaaccagtcagggctccgcccgctgtttgagcaggtagccgtcaattataaaccttccggagcggggaaaaaggcggaggggaagtccgcaggaaaaaatgaagcaaagacagagccgtcacaaaaatgacggaagacagaaagagaggagcaacattatgaaccgggaacagatgaggattacggagctttatgatttgacacatacacttgcagcagattatctttcaggatttgagtatccctgggacgcgcttcagggaatcagcgattttataattgctctgggcaacagcctggatacggaagaatacgaaaaaagagacggcaatgtgtgggtccataagaccgcaaaggtcgcttcgtccgcgtttctgaacgggcctgttattgtgggcagggaagccgaggtgcgccactgtgcctttatccgcggcagcgctctgattggagaaggagctgtggtaggcaattccacagagcttaagaatgtgattcttttcgataaggtgcaagtgccgcactacaattatgtcggggattcgattttgggctataaagctcatatgggagccggttccatcacctcaaatgtgaaatcggataaactgcttgtcagtatccatgctgcggacggagagattgagagcggacgcaagaaagtcggagccctgattggcgacaatgtggaggtaggctgcggctctgtcctgaatccgggcactgtaattgggcgaaattccaatatctatcccctttccagtgtgcgcggctgtgtggacgccaattccatctacaaaaggcagggagagatagcagggaaaaattaattatgcaggtgaggacgctgccggaactgccggcccgatcatcacaccggacatggtccgttccggacgcgtcctccattctcaattacccccatgtatttttaaaaggcatgatcattccgtcaaattatgctatgataaaatcagagagcatcaactccgcctgtatagttatacaataaggcggcaatccattagctatgttttaggaataaataattaatggataaggaggatattatgaaaaatttggaggtaagatatctggagcggctggcggaattgtatcctacaattgcggcggcttcgacggaggtcatcaacctggaggcgattgtcaacctgccgaaaggaacggagcattttttgaccgatatccatggagagtatgaggcgttttcccatgtgctgaagaatggctcgggggctgtgaagagaaaaattgacgatgtcttcggcaataccttaagccgtcaggataaacagtccctggcaacgctgatctattatccccgggaaaaaatgagccggattttacagacggagacgaacccggatgactggtacaaaataacgctgtaccgcctgattgaagtcagcagaagagcagcgagcaagtatacgcgctccaaggtgcgcaaggccctgccgaaagaatttgcctatgtcatggaagagcttctcaccgaaaaagcagatttaacggacaaagaatcatattatgacgccattgtccagacaattatcagggtaggccgggcaaaacagtttatcattgccctgagcgaattgattcagcgcctgatcgtggatcatctgcatattgtgggggatatctatgaccgtggcccgggtcctcacattataatggataagctgatgacttaccattccgtcgatatccagtggggcaatcacgatgtgctttggatgggggcggcagcaggtcaggccggatgcatcgccaatgtaataagaatctgtgccagatatggaaacctggatctccttgaggacggatacggtatcaatatgctgccgcttgccacatttgcattaaatacgtatgcagatgacccatgcacctgtttccagctaaaaggcggcaacacctatgacgcatcggagatggaaatcaatttaaagatgcataaagctatatcgatcatccagtttaaggcagagggccagattatcaaacgccatccggagttctgcctggatcggcggaatctgctccatcgcattgactatgaaaaagggacaatagaattggagggaatcgagtatccccttctggatacgaactttccgacgattgatccgaaggatccatatacctttaccgaccaggaagcagatatcatggaacggcttgagagggctttcacgaactgtgataaattgcagcagcatatgaaattccttttggcaaaaggcagtctgtataaggtatataataataatctgctctaccatggctgcgtgcctctgaacgaagacggcacgttcaaagaggtcgaaatttacggaaagaagtataagggaaaagccctttatgatattctggataattacgtcagaaaaggttttgtggcaatggaccgggaagagagggaacggggccgtgatttgatgtggtatatctggctccatgagaattccccgctttttggcaaggataagatggctacgttcgaacggtattttctgacggagaaggagacgcataaggagacgaaaaatccctattatcattttctggagaatgaagaggtgatggatcggattctggcggagttcggccttgcaaaagagggggctcatatcatcaacggccatgtgccggtcaaatccaaggatggggaaagcccgattaagtgcggcggaaaacttctggtgattgacggagggttctcaaaggcttatcagaaagagacgggtatagccggttacacactgatttacaattcatacggcctgattcttgccgcccatgatccctttgagtcaacggaggcggccattgaaaatgagagcgacatccattccgacagcaagatggtgaaatgggtgccggaacgaaaatgtgtgggtgatacggacatcggccgtgagctgaaagagaagataaaggatctggaaaaacttttggaagcatattatacgggtacaatcgcagaaaaatttactgttcagtaagcagaaacatggtcaaaaacaagctcattttcccggtggaatctcaccggaaaatgagctgtttttttcttttgaaggaacagaagaagaacaaaaatgtcgtaagtgttaagaaaattttacatttgttacaaaattaacataaagaattaacaatagaagtatattgtatgcagtatcctaaataaatggatgaatagtggaaagtatccaaaaaaatacaattttgtctttgctttattgtctgaatgtactataatatgagtgaataaaaaaacagtgtatcacactgaaaacaggagggaatgtagtatgttaagtttttttatttgccttgcgctgctgattggcggctattttgtctatggtaaaatggtagacaatacgtttgggacggatgacagggaaacacctgcagtgaggattaatgacggggtcgattacgtcgtcatgcctcagtggaagctgttcctggtgcagctcttaaatatcgcgggattaggcccgatattcggagcgcttcagggagcattatggggcccggttgtctttctgtggattacattcggtacaatctttgccggcggtgtccatgattatttttcaggaatgctgtcggaacgtaatgacggcgcatcgatttccgaggtctgcggtatctatctcggaggactgatgaagaatgtgatgagggtattcagtattgttcttctggttatggtcggcaccgtatttgcagtcggtccggcgggtctgattgtcaccctgttccagaacaacggcgccgcaggccttgtgacaaacaaggagttttggctgtgggttattctggcctattattttattgcaacctttatttcaattgataagattatcggtaaaatttatccggtattcggcatctgccttattattatggcagttggcgttgccatcggcattttcacaaaagcggagtttgtcattccggagatctggtcgaatttccataatatgcatccgaagggaactccgatttggagcgttatgtttattacggttgcctgcggagctatttccggcttccatgcgacacagtctcctctgatggcgcgctgtatgaaatcagagaagcaggggcatttcgtattttacggagccatggtgtgtgaaggcgtgattgcccttatctgggcggctgccggatgctccctgtatgccgttacaggcggccttaacacaggacttcaggaggctcttgccaacggtcagtccgctgccatttatgatgtgtgcaagaagacgatgggcggaatcggtatcgcacttgccatgcttggagttattgcatgcccgatcacttccggtgacacggctttcagaagcgcccgtcttgttgtggccgactggttcaagattgatcagaaggcatatgccagcaggctgaagctttgtattccgcttctggctgccggtgcgattatcggacatctggattacacgattgtctggagatatttcagctggacgaaccagacactggctatgatcgttttgtggaccgccagcatgtacctttacaaagagaaaaagaactactggcttaccgctgtgcctgcaacctttatgagcgccgtatccatgacgtatttcttctatgcaggcgaatgcctgaatctgggcacgacggtggcgtatccggcaggaattattctggcggtagtattccttggaatctttatgcgtgcaactaaaaaacagcagaccgcataagtacggccgaaacttacggaaaccatatttacgggtgaaccacaaaaacagaaccggagataaattatgatttttaagccagtaaaactcggccgtgacggcctgacggagcaggagcttcagacagacaggaagaagagccggaatttcggaccctgcggcgtgggagaaaaggcgctgtacctgaacagcttttacatagacaggcgatattatattccttttacgtccgttacccgcgtttttaagcgggtggcgatgagcaggggaggtttcagcggcaaagggatgtttgccacgattccttatcttgtagtggagtatgatgatgggaaggaaaagcagtgcaattttaaatacgaagagaatgtagaccgcatgctggcctgcatcggcaagtcccaaccggagatccggctggtaagccgggcggcggaagagaggcttaaaaagagggagcaggagcgcgcggagagatttcttcctgaactgtcaaaagaagcacagggagaggccggcaggcttcaggaggcaagagagtatctggaaatcaggccggagcttggcatagcgttaagtcagtcggccagaaggaaaagagcctacgacaagagcagcccgagttacaaatgggttgctctggcaatctctcttctgggcgccgcttctcttatttacgggatatattccttgattaaccacgtggagtttgccgtttatttcactcttttcggaatggctgcgatctttttgttctccggcgccagtatgctgccgacctccaggaataacaggacttatatactgaacagggtcaggctggcgaaggaggagatggaggaatatctgaaggggtacggagggaaaagcggtttccccgtaccggccagatatgcccatcccgttgtgctgaaacggatgattgaaattattatggagggaagggctgaatgtgcagataacgctttggaggttttaaaagaagatttaagggccttgaattccgatgtacaggtggagcaggaggagtatgaggaagtggtggcaataaaggccatgtttttaaacgaagattacagatagaaccgcttttgaaaggtattcataagcggaataaggctgagccggagagaatggttatctttggctcagccttttactgatggcgggaacctgtgcgcagagcgttcaggttaccgttcaatacgttcttcttattttgttccgaaaatccgatctccggcatcgccgagtcccggacagatataggcattctcgttcaggcagcgatccacatgtcccacgtaaatctgaacatccggatgagcttcatgaaggcgtttgagcccttccggggcagctataatcgccataaatttaatcgtcctaccgccgtgctgtttgataaaatccacagcctcaacagcagagccgccggttgcaagcatcggatcagtcaccacaatcgtacgcagttcaatcgggcttggaagcttgcaatagtattcgtgaggctgatgggttacctcgtcgcggtagagaccgatatggcctactttggcagaaggaaccagtgccagaatgccgtttaccattccaaggcctgcgcgcaggataggaacaacagcaagtttttttcctgacagcatgggtgtcatacaagtttcaatcggagtttcaacttcagcgtcctcaagaggaagatcccggagcgcttcatatcccattaacattgcaatttcgtcggtcagggaacggaactcattggtaccggtcgccttattgcggagaatggagatcttgtgctgaatcagagggtggtctaaaattgttacgttttccatagtaaaaacctgccttttaaatttatagtgttttcagagtaatataaaaaaatacatctgatttaagtattgccgtttaagattttgtgccttaacacaaaaacatgtaacggttcagaaagcatgaactgttacaaaaacattcagacagatgtattatacacctgtctgaataatcttgtcactatataaatagaatatttaagagaattgttgtaattttttggaaagaattgtcaacttatatccgggcaggcctgccgtcttgccggtaccggcccttccgaatctgtcagtctgctatttttctatttattatcaggactgtatttaataatcgcataattgccgagttcagaggaaagagggatacttacatagacaatcccctgtttttcatagctgaatatctcgggccagctggcagccggagtgctgttctcatcagccgtataaccgcctgaaaaatcagccgcctggagtttcttaaaataataatcggtggtcttttcggaactgttgatatagctccttacggactgttcattggcggaaacggattccagcttgtaatcgccggatgcaatataaccggctacggtgtaagcgtcggcataatcgctaagccgcatgttctgaactgtctcaagatcaaccgtattggtatagaacaggttctccgtctttgaagtggacggattcttcaactcgcctttataggagacgacaatccgtttcaggttggcggcttctatagtggctttcaccgataaagtctgatccggatggacatcggcgatagccattgcattcgtacggagcagggcattcacctgcttctgtttttcggcatccttcatgttggagacaaccgggtattcgaccgtcgccttgcctgcggtttcttttttaatctctgacttcaaggaaaaattggtgttattctttgacgcatcggcagactcctcagtcggtgccgtggtaggcgcctccgtagtttccggtatggtctctttctcaacagcggcagtagtatgcagtgatgataaatcgacagcctctcttttcttgcagcccgtaaaggccaaagcgcagacggcaatcgttgcagcgatatacagtttttctttacgcatagtttccctcctcgtgaaatttattgattacagcgaaaagccagcttatgattcaatatctggttcacggcaataattttgccttatggaattattatacaataattttgccgaaaaatgtcagaaaatatcattgaaattttcttaattttttagtcgaaatactttctttccataattaatgccgtgctaatgattaattgaaatacggcctgccgctgatggctataaggtgatttccataccatcataggcaaatgatatgttatctaagtttttttcaaattcccggtaataagcataggatttgccccagtattcgtcaatgtgggtgatgataatgcgcttgattctgtaagtatgtttgatttccaaaagttcctctaaggtgaacatatcatctttaaaaggcgcatcatcaagtgctcggccttctttgagcatgccgtcatcagaaaccagtccgattattaaaatatccgcatcataatacaattcattgaacacaaacggcttcacatcacagcaggcataaatcacctttttgtccccgtctgagataacataaaatgtcatattgccgcgatgggttttgttatttaccaggtgtatttctatttttcctattttgatgaaatctgtcttaataatggaaatacaatgaagaacattttcatagtagtataggccgtctccgttccacgcattgatatcgtccacaactccgggaagcgcaatgaattgtacgggagttcccctgtcggttatacaattgtagcccaatggctccacgatacgcatgcctctcgtatgatccgggtctttatgcgagatggacagatattcaattttagaaataccctgacggtcacaggcgacggcaatgtcctccggagtatcaatgagcatatggatgtcctcaatatagaggctcggccctaaccgttcataccggccgcgtttgattctcgcctcctcacagatgggacatttgcaaaatggatttggaatttgaaacattccgccgcttcctgcaatctttaatttcatcaattttacctcccagcctctttcattttattaacatctccctaatctgtctaatcatgcctgctggaattgtgtcgtcatccagcggcatgatactgctcagcatccggactccctgataagaaaaaaggagcagatcaacaacggcgttaatattcacctgccgaaactcgcctttgctgattccatacttaatcagactgcaaagcattgcttttgaaatgtaatactgtttcagcatggcgttatcgtcagatagtggaatactgctgtaatactcgtaaaaagcaagtcccagtgaaccgcttctgtcaagcatttcggactggtaacgttccagtaactcatccagaataacggttgcagactgaccgttttccatcttttcggcaatgtcattttccaggccggacataatttcatttatgatgtcggcaaaaatctgtccggtacttccataatgcatatataaaccgccgcggctcagtcctgctgcttcacatatgtctttcatcgtaacatccttaaatcccttccggataaataaatgtagcgccgtgttccgtattgcggcctttgttgcatctccctttttacccatggctttatccctccccgacatttccgacatgtgtgtctgtttttaatatacgacatacgtgtcggaaagtcaatgaattaattataagtaaaccttcttattaaaaatcattaaaactaactggtaaagaatatagaaaatggtatataataaaatcaggttactatttttcaaaatgtaattataaaagcagaaacaagatataaaaagcgtaagcaggaggtccatactatgaaaatgttatctattgcagaggaattgaagaacaattcctatcccggccgcgggattatcatcggcagatcggcagacggaacaaaagccgtgacggcatattttatcatgggtagaagtgagaacagcagaaaccgtgtatttgtggaagatggaaacggaatccgcacacaggcattcgatccgtcaaagctcacggatccgagcctgatcatttatgcaccggtcagggttctgggcaataaaacgattgtgacgaatggagatcagacagatacaatctatgagggaatggacaaacagcttacatttgaacagacgctgcgctgccgtgaatttgagccggatgcaccaaattataccccgcgtatttcaggcatcatgcatattgaggacggcggctacaactatgcaatgtcgattttaaaaagcaacggaggcagtccggattcctgtctgcgcttcacatttgcttatgaaagtccggcgccgggggaaggccattttatccatacctacatgcatgatgcaaatccccttccaagctttgagggggaaccgaagctgatctcgattccggatgacatggaagcgtttgcagagcttctctgggaaaacctgaatccggaaaacaaggtttctttgtttgtgcgatacatcgacattgcaaccagagagacacgctcaaagattatgaataagaatcagtcataagacccgacgggtatagcacaaaggaggaatttccataatgaaagaactggaattaaaatacggctgtaatccaaaccagaaaccatccagaatctatattgaagacggaagcgatctgccgattcaggtattaagcggccgtcccggatacatcaattttcttgacgccttcaacggctggcagctcgtaaaagaactgaaggcggccaccggacttccggccgccacatcctttaagcatgtatcaccggcaggggcggcggttgggcttcctctcgatgacacaatgaagaaaatttactgggtggaggatatgggagagctctccccaatcgcgtgtgcatatgcgagagccaggggagctgaccgtatgtcatcgtttggtgattttgtatcgctttccgacgtctgcgacgcggatacggcgcgcctgattaagcgcgaggtatcagacggtgttattgcgccaggatatacgcaggaggctcttgaaatcctgaaagcgaagaagaacggaaactataatgtgattcagatcgaccctgactatgttccggctccggttgaaaagaaacaggtgtacggaatcacttttgagcagggaagaaatgagcttaagattgacagggagcttctctcaaatattgtgacggagaagaaggagcttcccgattcagccaaaattgatatgatggttgcgctcattacgttaaaatacacgcagtccaattccgtatgctatgtaaaggacggtcaggccatcggcgtcggcgcgggccagcagtccagagtacactgtaccagacttgcaggccagaaagccgataactggtacctgcgtcaggctccccaggttctgaacctggaatttgtggatggtataagaagagcagacagggacaatgcgattgatgtgtatatcggtgaagaatatatggacgtactcagcgaaggcgcatggcagaagatattcaaggtaaaaccgcccgtattcaccagagaagagaaacgcgcctggttagaccagatgagcggtgtcacccttggctctgatgccttcttcccgtttggagacaacattgaacgcgctcataagagcggagtggaatatatagcccagcccggcggctccgtgcgcgacgacaatgtgattgaggtatgcaataaatatgggattgtgatggcgtttacgggtatccggctgttccatcattaataaatgttccgttgccacccggccggaattatcgcaaaaatcttgcgtaaattccggccgggtgacatcaggtccgaattgtgataacaaattatctgttttttataaaagtggttgcatttttcttataattttggtaatataatattcgctgacagcacgccggcctgtcggaatggcagacgaggtggactcaaaatccattggtggcaacaccgtgcgggttcaagtcccgcggccggcacgaagcataaaccgtgaattttctggtaatatcaggagatttgcagtttttttgattactgtaaaaagtagtccaaccagaacaggaatgtggtataattgaggtgttacattcggtgatgaatataacagaaatacaaatcaggaggggaaaagcatgaaaaagaaaacaatccgattaacaggttttgcattggcgatgatgctcagtttatcgccaattgtgccggcgggcagtaatccatttgtgttcactgctgaggctcattccggcagaacagattcaagcggggccaccgggataataagaataagagcggattgggcagctatcattatcattgcggaggttatccggcccatttacatacgaatggagtctgtccgtataagaatggggctgccggcagttccggaagcacaggctctgccaacggtaatgcatccggcgccggaggtactcaggctgccgctccgataccggaaacaacggctgcagcgcccgtggaaactttaggctggaaacaggatgaaaagggctggtggtacaaggacagtgaaacgacttataaaaaagacggtgtatatagtattgacgggaattattacgcttttaacgccgaaggttacatgataacaggctggaaggagataggcgaatactggtattattttgatggaaacgggcatatgctgatagatgtttgcactgtgattgacgggtcctattgttatttcgataaaaatggcaggtgggatgaggagtattatgacagcttcagtgattacctggataattatgattattaatacagcattgcaggtatgggaatataagagggggaaggtttcggcgctcccggcgcaatgacaggaaaaaggatacaggggctctaatttaaaggctcccgtatcttttttattgaacaggtcaccgccataaatataaccgctttgcgggtatcactgcgggcggatgctaaaactgacctttaaaaaactattaaaattggatgtttttatagtgtcagtccaatgctataatggggacacatgagaatctataatagcagaaggtgaggagataggctatgaacaatgagagaacaatgaatacacacagagagggcagtgcggctggcagaagagaggttcattcgaacgtgatgtcggtcgtcatgacagcattttttgcggctgtaatattcctgggaatccagtccttccggataccgctcccggctgcagtaggaacgccgtttcttcatttcggccatatttttgtaatgctttcgattgtttgtctgggtggaaaacgttctgcggtgtcaggagtattaggcctgataatttttgatattttaaatggctatcttcacgccattcccaatgtgtttgtcagtacaattataaaatgtctgtttgtggggccgtattctcagttatgaaaagaagagcggccggggaacggaagaaagagtacatggcggctgttatctgcgcagctttgtatggaatcacaaatatcgcagtagattttgtctggtcggttgcggaacttgttttacttggcagtacgctcagcgcagccgttgcggcagaggtgatgtccattccggctacgattatcaatgcaggctttaccgttattgggattgctcttctttatatccctgtaagctcggcctaccgccgtatcggttagagatggcatatgctcatttaatgtggtaagcaggacgggaaaggacagggacaattgctatggatacgaccgcaattcagacacttttaaaagaatatgatctggacggatggctttttacggattttcagggacgtgatcccattacacatgattttttgaaactgactgaccggaagtgtaccagacgtttgttctattacattccggcagcaggacaaccggttaaagttttgtcggcgattgaaccgcttcttttggatcatttgccggggaagaagttcctgtataaaggaatacagggacaacgtgaggtgctggcgcagatattggagccgggtaaacgcattgcctgccagtattcgcccggaggcaatgtcccgaccatcagtaccatggacgccggtctggtggaatatttgaggacattcgggatggagccggtgtcctcagccgatctgatgcagcatttcggcgcggtgcttaccgaagcccagattgagtcccaccgcaaagcaggggttatcatccatcggattttggatgagatattctcctggattcggaaaaatctgaatgagggcaggtatattgacgaatggatgatgttgaaagagtttgggaggctgatcagagcagaagaaatttatatggattcgccgccttttttcggcatcgacgatcatgcctgcgacccgggatatgagccggagccttccggttcgaggcagatccgggaaggcagccggctgattattgacattgccggccggctgcccgaagaagatgccgtctactatgacatctcctggtgcatgaatgtggggccggagattgacccggaatacgaacggttattcaattcggtatataatgtcaggagcaggattttgtccttcatccaggaacgtctgaatgagggaaaggcaatctgcggatacgaagccgatgcgctggcgaaaacgctgttccgggcccagggactggattcgtatatcatgcaccggaccggccataatatcggacataactgccatggaatcggagccaatctggatgattatgaaacgcatgacgtgcgccgcctcctgcctggtaccatgttttccattgaaccggggatttatacacaggagtacggtgtaaggctggaatatgatgtatatataacaaaagataaaaaaacgaaaatctttgggccggtaccggataagattctggtaatttgaaataattgttttcagtgattgacaaatggtgtgagataccctataatgcaactaactattttacgggagtgttcattatgacagcaaaaaattatgcatgtgcgaatacaacagcatatacattttatggctactggtgcttttattttgtaccggttctttttgctgcgcgtgagcatttacggatagtcagacagtatcagtagccagatacttagcgggagatttgacgagccgatgtttgcatgtgcagacacggctcttttttaatttaacaggaaaacattcctgttaaattaaaaaccgctctgcggaggatcccgcgagcggaattccggataacagcaaaagccccgcagagacgggcagaagggagacacatcatggagcagaaaattttagattgtacattgagagacggaggactggtaaaccgtttttattttacggatgactttgtgcgcggactgtatcaggcaaatttacaggcaggcattgactatatggaatttggatataaggcatcggaagcgctgtttgaccgcagggagttcggaaaatggaaattctgccgcgaggaagatttgagggctgttgtcggggataataaaacctccatgaagatttccgttatggctgatgtggggagaaccgactacagtaaagacattttggaaaagaaggacagtgtgattgatatggtccggattgccgcctatgcggaacagatgggggaggcaatggagatggtaagctgctgcaaagagcgcggctatgaaacatcggtaaatattatggcgatttccaataatacggatgaggagataggcagggcgctggaaaccgtgagtaaaagccgggccgacgcagtctatgttgtggacagctacggctccttttatccggaacagattaaagcgctgacaaaacgatacattagattggcggggaatggcagaaaggtggggatccatgcccacaacaaccagcagctggcatttgccaatacgattgaggcaatgcggtgcggcgccgcgcttctcgatgtgacggtgaacggaatgggcaggggagccggcaactgcggttcggaacagctcttgggatatatcggctcatcggaaaaatataatgagctgccagtgatagagtttattgaaaatcatgtccttccgttgaagcaggccggcatcctctggggatatgacattccgtatctcctgacagggcaggggtgcaagcatccttccaaagcgatagaatttgtcgagaaccacaggacggagtacgcgggattgttcaggcagatgatgggggcgtaaaacaatgaaagggatcgcttgaaaaatcgggtataatattgtatgatatacgaaaatgggcagagcaggccttgtggaggttgtgctctgccgttacaatggaggtgatggcagtgacttgtcaggaagcagagcatctggtgacgccgtatattaatgatgaactgaccggtgatgagacggaagcatttttggcgcatattgagtcctgcaggaactgccaggaagagctggaaatctattttatggtagatgtcggactgaagcagctggacaaaggctacggtacctttgatatcgcaggggcgctggaacgcagaatcgaggaatcctattccagggtacacaggatgtggctgttccggtcacttaagtatgcagtcaacacgctcagcattatggcagtgattgtgacggtgcttctccagtttcgaatctggtttttttaaaattgacaggacaggagacaataacatgagtaaattagtactgatagacggccacagcatactgaacagggcattttacggtgtgccggaactgaccaattccaagggccttcatacaaatgccgtatatgggttcctgagcattatgttccgggttatcgaggatgaaaaagcggatcacctggcagttgcgtttgacttaaaagatcccacattccgccacaagatgtttgaggcatataagggaacgagaaagccaatgccggaagaactccatgaacaggtccctgtcattaaggaagtgctggcctccatgggcattccaatcctgacacgtcccggctatgaagcggacgatatcctgggaacgattgctaagcggtgcgccgcccagggagtggaggtttctgttgtctcgggagacagggatcttctgcaattggcggatgagaaaattaagatccgcatgccgaggacatccaggggaacgacggagatcaaggattattatcctgccgacgtacaggcggaatatcatgtgactccaacggagtttatagatgtaaaagcgctgatgggagatgcatcggacaatattccgggagttccctccatcggtgagaagacggccaccagcctgatcacggcttatggttcgattgagaatgcctatgcgaatatcgatgaggtaaagccgcccagggcgcagaaggcgctgagggagcattacgatatggctcagatgagcaaggaactcgcgacgatctgcattgactgcgatatcgattttacgctggaagacgcaagaatcaacaatttatatacaccggaagcttatcagcatatgaaacagctggagtttaagtccattctccagaaatttgatgctgatgttttttctgcttcgaaagtggaagagcattttaaaaccgtatcggagctttccgaggcggagaaaattttcagtgaggcagccggaaaacaggaagccggaatgcagcttgttattgagaacggacaggtggccgctatggcgctctgttacggcgaggaaaagatttacagcattcccgcagcaggctttatcacaggtgaatatctggcagagcggatggaagagctttgcacggccgttccctctgtcagcgtgctggatctgaagccgcagcttccgtatctcaagaacagggacaggcgagtggtggatggcagcggcaacgatggcggcagtgaggccatgttcgacgccggtgtggccggatatctgctgaatcctctgaaggacacttacgattacgacgaccttgccagggattacctcgatatgacggttccgtctaaggccgatttaatgggaaaaacttcatttacggcagcatttgacatgatgcccgacaaggcgcagacctgcgtctgctatatggcatacgtggcgtggaaggccaagcccgagctggttaaaaaactggaggcatcgggatgcgcaaactgttctttgatattgagatgccggttatttacagtctctatcatatgcaggaagaggggatctgcgtacgcagggaagaactcaggtgttacggggagagactgaaggtccagattgataagctggaacaggagatttatcaggatacggaaactgagtttaatatcaattcccccaaacagcttggagagatcctgttcgaccggatgaagatgccgggcggaaaaaagacgaaaaccggatattccaccgcagccgatgtgctggagaagctggcgccggaatatcccgttgtcagaaaagtgcttgactacaggcagcttacaaagttaaaatccacttatgcagacggtctggccgcttttatcagggaggacggccggatacacggaacctttaaccagacgataacggctaccgggaggatcagcagcactgagccaaatctccagaatattccggtccgcatggagctgggcagggaaatcaggaaggtatttgtcccgcaggagggatgcgttctcctggacgccgattactcccagattgagctgagagtcctggctcacatgtcgggggatgaacggctgattgacgcctacaggatggcggaggatatccatgccattacggcatcggaggtgttccatgtgccgcttgaggaagtgacgccgctgcagagacgtaatgccaaggccgttaactttggaattgtatacggaatcagcgcgttcggactcagtgaggatctgagcatttccagaaaagaagccctggaatatatcaaccggtactttgagacatacccggaggtgaagaaattcctggatcaccttgtggagctgggaaaagagcagggctatgtggaaacgatgtttggaaggagaaggccgattccggaactcaaatcggcaaacttcatgcagagatccttcggagagcgcgttgcgatgaactccccgatccagggaacggcggccgatatcatcaagattgcgatgatccgggtggatcagaggctgagaaaagagaagcttcgctcccgtctggtgctccaggtgcacgatgagctgctgattgagacatggacggatgaacttgagaaggttcagaaggttctggaggaagagatgaagaatgcggcccatcttaaggtggagcttgagatagatatgaagacagggcattcctggttcgagacgaaataaaaagcaggacgaaaaagaacagggaagttcaaattgagatataacagaagcggcaggatgtggaggaagagaatgaaagtcatcagcatcaccggaggcgtcggctccggcaagagcgaagtgcttcggatattgcaggaagagttcggggcggatattatcatagcggacaaggtggcccaccagctgatggagccagggaagaaaggctacggccgggtggttgccgcctttggaacctcccttctgagcgctgacggaagtatcgaccggcagaggatggcggagctgatattcagcgataaggattcaatagagaagatgaattccatcattcaccccatggtatggagtgaaatcgaatatgcgatagcccattccgacaaaaatctggtggcagtggaggcggctctttttgacgaggaacacaacgctatgtttgatgaaatctggtatatctttacaagcagggaaaaccggattaaaaggctgatggaaagccgcggctactccagggagaaatgcctggaaattatggcaaaccaggtgtcggaggatgaatacagggcgcaggcggaccgtgtgatagataacaacgaaacagtggaagagatacgtactcagataaagagttacattcacggccccgctgaaaagcgcggttccgcaatagtaacgataaagaacatattggaagaggaataaagcagatgcggatggtaagtatagcaagcggcagcagtggaaactgcatctatgtgggcagcgatgagacccatattctgatagatgccggaatcagtaataaacggattgaaaagggactgaatgaaatcggggtgacgggaaatgatctggacggaatcctgattacacatgagcattccgatcatataaaagggctgggagttctggccagaaaatacggcactccgatttacagcaccaaggaaacgctggaggaaatcggtaatgtgaaaagcctgggagattaccccagggagttatttcgtcctatctgtcatgatgtggacttttacataggcgaccttgagataaagccgttccgcatagatcacgatgcggccaatccggtggcataccgggtccagaataaccggaggtcggtggcggtagctaccgatatggggcattattcacagtatatcattgaccatctgcagggactggacgccattttgctggaatccaaccacgatgtaaagatgctggaggcagggccgtatccatattatctgaaacggcgtattctcggagattacggccatctttccaatgagaatgcagggcgtcttttgaactgtatcctccatgacaacttaaaacatattttcctggggcatctgagcaaggagaataattatgaagaactggcttatgagacggtgcgtctggagataagtcagggagattcgccgtatacggcgtccgattttcctattacagtagcaaagcgtgacgaaatgtctccgattgttacattatagatttgtactactaaaaagagaagaccagagaatcgaggaggaaccgctatgagcaaaattattattactatcgttgggaaagacagggtgggcattgttgccagaacgtgcaattacctggctgaaaacgggatgaacattctggatatcacgcagacgattctgcaggagtattttaacatgatgatgatcgtggatatttccggatccccgaagtcctttgacgatatggcaaaggagcttgaaaaggtaggcgaggatatcggcgtcacaatccgctgccagagggaagaaatctttaccagcatgcaccgcatctgataacggggcaggagaaaggacggaataaacacatgattaatatgtttgaagtaattgagaccaacaatatgattgcccatgagaagctggacgtacgtaccatcacgatgggcatcagcctcctggactgtattgacagcgacctggcgaagctgaatgagaagatttacaataagatcacttcctatgcaaaggatctggtatccaccggagacgctattggaagggaattcggagttccgattgtgaataagagaatttccattacccccattgcgttagtcggcggcagcgcctgtaaatctacggaggattttgtagagatagccaagaccctcgataaggcggcgaaggaagtcggcgtcaattttatcggcggatattcggctcttgtgtctaaagggatgacacctgccgaggaacgcctgatccggtcgattccgcaggcccttgccgtgacggaccgcgtgtgcagctccatcaatgtcggttccacaaaaacaggtctcaatatggacgcggtacgcctgatgggcgagattatcgtggcgacggcggaggcgaccaaagataaggattctctgggatgtgcaaagcttgtggtattctgcaatgcgccggatgataatccgtttatggcgggagccttccacggcgttactgaagcagatgcgataatcaatgtcggcgtcagcggtccgggcgtggtaaagacggcgcttgagaaggtcagaggggagaattttgaagtcctctgtgagacaattaaaaaaactgcgtttaaaatcacccgtgtcggccagcttgtagcacaggaagcttccaaacgtctcggtgttccatttgggattatcgatctttcccttgcgccgactcctgcgatcggggacagcgtagccgagatcctggaagaaatcggacttgagcggagcggtgcgccgggaacgacggctgcccttgccatgctcaacgatcaggtgaagaagggcggtatcatggcttcttcttatgtgggaggcttaagcggcgcatttattccggtcagcgaggatcagggtatgatcgatgccgtggcggaaggggcgctcacccttgaaaaactggaggccatgacatgtgtatgttccgtcggccttgacatgatcgcaattcccggtgatacaaagccatccacgatttcaggcattatcgcagatgaggcggccatcggtatgatcaaccagaaaaccacggccgtccgtctgattccggtaatcggaaagaaagtcggcgatacggctcagttcggcggccttctgggctatgcgccgattatcccggtcaataaattttcctgtgacgccttcataggcaggacgggacgcatcccggcgccggttcacagctttaagaattaaagttagttggggcccggaggacgagtacggaacggaccacggatgttcctgtctgcgtcctccgggcctcaattagtaacagaaagatggaatagcaatggctgataaaagagaattggaagaagcgttccgcttctttttaaacggggagctggaacggatgattttcagcaacccccgcaaccgtgatcattacatcaagatgactgtgcgtccccttatgcttaaggggacgctgaaatttcaggtggaagagtttacggaaaaacaagcgtttcaaaaaaatatggacagggaagaagcactttcttatctgcttaagcagcttgacagtctctaccggaatggggaggttgtctcaggggccggttccatgaatgtcctcgttggtaaaaaggggacggtcactgtgaagaaaaagctgaagatagcgcccggacaaaagggaaagggcgctgcctcaggaaatgatctgtctgcggaggctatggagcgcctggcgagccataaccggaagaaaaattacgttttggcggaaggcactccggttccctttctggcggagcttggcgtgatgacggcggacggaaaggtagtgaaggcgcggtatgataaattccgccagatcaaccggttcctggagtttatcgaggatattctgccgaggcttgaccggaaccgggtaaataccatcatcgattttggctgcggcaagtcatacctgacgtttgccatgtactattatctgaaggagcttaagggctatccgattcaggtggtgggactggatcttaaaaaggatgtaattgcgctctgcaaccggctaagtgagaaattcggctttgagaatcttcatttttaccatggcgatattgccggttatgaaggcgtcactcatgtggatatggtggtgacgctccacgcctgcgacacggccacggattacgcgatggcgaaagcggtcagatggggagcggatgtaattctgtccgtgccgtgctgccagcatgagctgaacagccagataagtaacgggctgctccagccggttctgggctatggactgctgaaggagaggatgtccgcgcttatcaccgacggtatccgcgcgcagcttctggagcagtgtggatataagacgcagatactcgaatttatcgatatggagcatacgccgaagaatattatgatacgggcggtgaagcagggaaaaccaaagaaggatgaagggctggaacttcagaaattaatggaggagctgcacgtggagccgactctttaccggctgcttcgggaagaattgtaaataccaaggaagagtaaatgaaaagggaatgcgtctcatgaggcgtgttccctttccggctttgcggagacggtatcaggcagcaggccctgggttcctattcacacggcaatgtcagttagttaacagtgtaataaattggagatttaactgaggttggaggacgcgtccggaacggaccatgtccggtgtggtgagggggatggctgagtcttccgtccccggttggagggtgtcgtgaggggggaatccggtcggaatgaattcttacggggaacgtttgcactcttcgaagcgcatagccgtgctaaattcgaaaaaacctcattaagcacggatgggcttccatgtcccctccagaattgattccgcctccttcccccggtcaaggtttcgcagggacggaagagccagcggaggttttcgcggcaccggacatggtccattccgggcgctgattgtctctaaccttaaatggggagagccttgtcgcgaccacaacgtgtttccggcatgccgatatcaaatcttacgcctttaaaaaggcgcatcgaaggcatatcatatttaccgtacacggtaacactgagtggccgcgacaaggtccgcccccgcacttaaggcgtgagaccatcagcggccgcaggccagtggacggggccgatatccttggccttaagtctttcgtcccggcgaaaacccggccttggggcggaggggaagataaagtctgcggatgccgttgaaatccatcgctgattagcgaggtcccttacgagcttagcagcgcgatgcatttcacagagcgggagtgtgctccgcagactttatcttcgcccgcagccccaaaccacgacaatcctccccgggacgaaagactcatatacacaccccaccaccccgtccgctggccgttccggcggcgtcctcacctgcttaactaaatctccatagtgttaactaactgacattggttcacacggttgtaactccggcccagtaccggaaattataacgccctgcgtatattcgttccggaaggttccgccttttgtatgccggatcatctgataaatatgggcggaacggatttcctgttccagcatggacagcgcgtttttgtccagtttcttacctgcatcggccagctttgtaatgagcggaatgcaggaggagtgtttgagcctgctcaacagcggcccggagtccttcctgaaaccgagaatcctcgcatagggagcgtagccgctgtccttaaagcggcagatatcggactcctgtatatccagaatcagatgtaaaagcgcccggctgacccgggtgtaggtgagctgccttgtctttagggcccggatccattcttcaaaggagacgggcaaggctgcgctctttctgatacgggcatccagctccggcgtaagctctgcgatccgctcccagccgcctccgagtatgcggtagttcagcagggtggaaaagtcgtcggtgaaaacggggatttcttctttaaaaaggcggaaggcaggttcgggaaccatggagcgcagcgccgccggcatatccccggggccatttgccgatgcaggccccttcgcagattcaaccagcgcgcggatcgcggatgcggaggccatacctgtaaagcactccgccttatccggcagcagcgcggtgtcatggtatgcctgtccttccctctgtattgtgtaaaaatccagtgggctgtgaaacatcattccggctttgatatattcaatgccgagggtattattcggcgaattcaggatttcctgttcctcttcatccaaaaaggacagaagggcccggtgccttgcctcgggaaatgtcattccattcttcaggtaagttctcagagcctctttgaattgtacaggttcatccgaaagcaatccggcaatcttggtgagagctgcgatatcgccgcattcacttccaaagcagacggagtcaataccgagggcagagaacagagcgatgctgtaggaggcaaattccatcgcggatgcggtggaaaaggacaccggcatctcgacgacgagatcggctccggctgagagagctgcggcagtccgcacatacttatcataaatggccggggcgcctctctggacatagctgccgctcatgagcgcgatacagtaatcagagcctgtcacttctttggattttctgatgtggtacaggtgaccgttatgaaaggggttatattctgtgatgagtccggtaattttcatattatttcctgcttttttgagttttcctgatggatcgtgtaaccattttttacaatcgcaatgtgttaagattgcgcaaaggcttatagccgctctttgttttggttacaattatataggaggaagtaaattccgtaaagggtaatgttcggttaaaaaagaaacaagcctgttaaaaaaataattaatccgaaaatggaaattatctcttgtatacaataaacaagtggtatataatgttagcagaataaagaacacacacacttatgaaaggggttttttaaccatggcatttattgatttaatgaaagaaaaagcaagacaggacaaacagaccatcgttttaccggaaagtaaagacaagagaactctgattgccgctgctcagattttagaggagggcacagcagacctgatcatgattggtaaagaggaaaagatcctggatggtgccggttggttggaagttgatctgacaggaatcaaggtagtagacccggatctggatccaaactttgctcattatgcggaaaccttatttgaactgagaaaacataaaggaatgactcttgaaaaggcagaggaaattctgagagaagattacattacctacggcgttatgatggttaaggagaagattgcggacggtctggtagccggagcatgccatgctacggcggatacattaagacctgctcttcagattttaaagacagcaccaggcacggagcttgtttccggtttctttatcatggatgttccggactgtgaattcggcaataacggtacgttcctgtttgcagactgcggactcaaccaggatccgacagcggaagaactggctgccatcgctgactccagcgccaagagctaccgcgctctggtgggagagaagccggttatcgccatgctttcccactccacaaagggaagcgcacatcatactctggttgataaggttgtcaaggccaccgaaattgcccatgagaaatatccacagcttgatctcgacggtgaattacagcttgatgccgctatcgttccggaagttgctaaatccaaagcgaaagacagcgaagttgcaggtcatgcaaacgttctgattttcccgaacctggactgcggaaatatcggatacaagctggtacagagacttgcaaaggcggaagcttatggtccgatgttacagggtattgcaagaccggttaatgacttatcccgtggctgctctgcagaggatattgtcggcgtggtagcgctgacagccgtacaggctcagatgtcataattcagaccgtctggccgcgccgcatcttaaatgttcgattttgaggcggcaaataagttaagagtttatggaaaagtgagaggaagaaaaaatgaatatattagtaatcaactgcggaagctcatctttaaaatatcagttaattaattccgcatcagaggaagtactggcaaagggactttgtgagagaatcggtatcgacggtaagcttacttatcagccggagggcggagagaaagaaaaatccgacgtttccatgccgactcataccgaagcgattgatgctgttatcaaagcgctgaccaatgagaagacaggcgttatcaagagcctttccgaagttggcgcagtcggacaccgcgtggtacacggcggagaaaaattcacctcctcctgcatcatcaacgaagagtcaatcaaggcgattgaggagtgcaatgatctcgctcctctgcacaatccggccaacttaatcggaatccgtgcctgccaggagctgatgccgggcgtaccgatggtagccgtatttgataccgctttccaccagacaatgccggagaaagcatttatctatggccttccatatgaatactatgagaattataaagtaagaagatacggtttccacggaacctcccacagctatgtatccaagagaacggcagagattatcggaaaaccatatgacgaaatgaagattatcgtctgccacttaggcaacggtgccagcgtatcggcggttgactgcggtaaatccgtagacaccagcatgggccttactcctcttgagggtcttgttatgggaacacgttccggggatattgatccggcgattctcgaatatgtgggaaagaaagagaacaagaacattgaccagcttatggaagttctgaataagaaatccggactgctcggaatctcctgcctgtcaagcgacggacgcgatctggaggatgcggcggcagaaggcaatgcgaaggctcagcttgcacttgacattttcgactacagggttatcaaatacgtaggcgcctatgcagccgttatgaacggtgtcgatgcaatcgcatttacggccggtatcggtgagaacaacaaggagctgagaaagaacgtatgtgcaaacctcggttacctcggtgttaaaatcgatgatgagaggaacaatgtaaggggagaagagagaattatctccaccgatgattcaaaggtaaaggttcttcttgttccaaccaacgaagagcttgcaattgcaagggagacacttgcgttagtaaaataatgacggaaagtccgcagagcgtacttttcgcagccggctgctgaaagaaggacaggcagagcctctggagttttcaaggctctgcctgagtccggctttcggaggagcgggtaattaaaaacctcattttagggcaaggctgtaaacatcaataatttgtcgaaaatttggaataatatacaaaataagcattgacaaacatgaaagcgctatgtataatatcatagtgcgtattaggagattagtatgctgattaatttatctgaactttttacctgtgaaggaaaaagaaaggtttatacggtatcatttgaacttggatccattgaattcggcggtgacatctataagattgtcaaagcagagccgtttgagctggagatagccaatattggcggaggcaaaaaatacacgatgtcgggaggactttccgtcactgtggaagcgccgtgcgccaggtgcctggaaccggtaacttttgtctgtgaactcgtttttgaccgggagttggatcttggaaagaaagaggagcaggaggatagtttggatgaagagccgtatttaagcggttatagtctggatgtagaccagttggtttgtaacgaactgctactgagcttgcctatgagagtcctgtgtagtgaagactgcaaagggatttgcaatagatgtggaacaaatctcaatattgggacttgtgcctgtgacactaggtcgctcgatccacggatgtcagttatccaggagatttttaatcaatttaaggaggtgtaaccatgtctatatgtccaaagaacaaatcttccaaagcaagaagagacagccgcagggctaactggaagatgagcgctccaaacttagttaaatgcagcaaatgtggcgcattaatgatgcctcacagagtgtgcaaagcttgtggctcttataacaagaaagaaatcgttaaagtagaagattaatttttagctgtgagctaagttgaaagatttagtaaatcaaggcccctgagatacctctcaggggccttgattagttggtctgttaaaagccgtatccccggcgtatctgcccggcacaaatgattgatgtatctgctgaataatggtatgatattcgaaacagtaaaatacacggatatccaacaggagggcataccacagacggcggcgggcctgaccgccaatttcctgctgatgagattttgatggctcaaacagagcttataaagatgacggtaagacaggagggaaagttttaaatgacagaacaatatacagaatttcaaaaaagagcaatcgagagcgtaaaacgcatatggagactctatgtcgtcaatctgaagcctgaggagctggaatccagctttcgcatgcttcctgaggattttctgatgattggcacgggccgtcacgaattttacaaaaacagggacgactttttaaaggggatgacggcagatcaggtggaggccagggatatccagtttgaattgcaggatgattggtatgaggcgcagcggataaccgatgatgtatgtctcgtctatggagggatttggatccgtgagaagtccacaccgggaaagccggttctgatagatatggagggcagccggtttaccgttgtctgccgggacactcccggcggcgtgcagatttgcaatgttcaccattccatgccgtatctggatcagggagaggatgagtattatccgaaatctcttgcatccctggcaaatgaggccgtacaaaagagcagggcgctggaacaccggatggaactggaccatatgacggagctttataaccggatctatatggaacggcacgtttcccgggcaatcaaaaatgagaacggttattttctggccattgatttagacgactttaaatgtgtcaatgattctaaaggacatttaacaggggatgaggtaatcagggaattttcccgggttttgaagcggtcattttctcctgcggcaatccttggacggatgggaggcgacgaatttgccgtgtgggagagctgcagtgcagactatgatgcggtggaaaagcaatttctcagactgttaaaggaatgcagtgtgctgtcggagcggttgcacgtatctgtaagctgttctgccgggatagccggaagccgcaggacaggggaagattttacggcgctctacaacagggcggacaaagcgctgtaccgtgcgaaggggcaggggaaaggcgttgtctgccgggcagaggagtttgaataggataaggaataaattatgcaaaagcatgttatgaagctgttttcacagcctacggctgactggttttccgatacgttcggaatgccgacgagagtgcaggaggaggcatgggccgcgattgcaaaggataaagatgtcctggtcagcgcgccgacgggaacaggcaagacactctctgcttttctgatcttcatagaccgtctgaatgcgctggcggccggggagatttaaaagaggagctgtatctgctctatgtatcgcctctgaaatcgcttgccggagatatccgcgagaatctgcgccgtcctctggacggaataccgaaaaaagcagggcagccggaaattgtggcggccatgcggacgggagatacgccccagaaggaacgccaaaggatgataaaacaccctccccacatcttgatcacaacgccggaatcactttatctgatgctgacgtcaaagggagggcaggaaatactcaggacggtgagagcggttatcctggatgaactgcatgcaatgattgatacgaagcggggagcgcatctgatgctctccattgccaggcttgagaagctgagcggacgaaagctccagcggattggattatcggccacaattgaaccgcttgagctggcggcggagtatttgtcaccggagtctgccgtcattgctgctccgccgatgaaaaagcaggtgaaaatagagattgtgggcaccgtgccctttggggaaaagcgcaaagatcctctatgggaggagctggccaagattgtctatgaacaatgtctctcctataaaagcgtgattgcattttcggaggggcgccgctacgcggaaaagctggcttattatgtgaatcttttgggaggggaggactttgccagggtccatcacggcagcctgtcaaaagaacagcggatggaagcggaagaggcgctgcgaaagggaaaactccgccttttgtgcgccacctcctccatggagcttgggattgatgtcggtgaaatcgaccgcgttctccagattggctgtccgcgcaccgtatccagcacaatgcagcgtctgggccgtgccgggcataatccgggcaaggtgagcgtgatgacgatgtatccgcggaccgcgccggagagcgtatattgcggcataacggcggagattgccaggcagggcggcgtggagcatgcggccccgccggcaatgtgccttgacatcttagcccagcacctcgtttccatggctgtgggagacggctattcggtggacgacgtcatgggaattttgtgccgggcctatcctttccgccgcgtgacgaaagaggatgtgagggcggtactgcgcatgctggccggcgattacgagcacagccgcgaaataccggtccgcccccggatactctatgaccggattcacgatcgggtgacgggggacaattacagccggatgctggcagtggcagccggaggcaccattccggacaaggggctttacacggccaagacggaagacggggtgaagcttggagaactggatgaggagtttgtctatgaatcccagattggcgaccgctttttactgggcgccttcgcatggagaattatgaggcaggacaaggatacggtatacgtggccccggcgcaggtggagggagccaggctgcccttctggaaaggggagataaagggccgggcgctgcgcaccagccgggcctttggccgcatcatgcgggagctggaaaactgtgccgaagactcggaggaaagtcttttaaaagagctttaccgtctgggtcttgatgagacggcggctgaaacggcttccggctttttgtcacggcagattgaggcgaccggagggctccccgacgataaaacggttctggtggaacattttaccgaccacacgggaaactgccaggtcatggtgcatgccctcttcggaaggagggtaaatgcgcccctgtccctgctgctccggcatgccgccggtgagcagagcgggatgaatctcggatgtgtggatgacgacgacggggttctgctctatagttacggaggggaaaaactgccggagggcctgctgtaccagattaatccggatacggtgaagcctgttttggaagcagtgctgccgctgactcccgttttcagcatgacattccgttacagcgccgccagggcgctgatgatggggatgaggcaaaacggccgccagccgctgtggatgcagagactgcgcagtacggaaatgctggattccctgatgggggagagagaacaccctctgatgcgggaaacacggagggaatgtctggaggatttatgggatatcggcggcgtgacggaagttttaaacgaaatccgctccggctgcataacggtccgtgaggtgtacgtcgatgtgccgtcccgatgtcccttcctttccagtggaaggtggagacagaggagatgtatgaatattcgccttcaacgcccggaatccgtcaggcggcatatgaggaactgagacagatggagcggatgaaaccatccgcagaggagctggcccggcagcaggaacggaagaaactgccggagaatgaggaacagctccactccctgctgatgatggagggagacctgactgcaggagaacttccggtcccggtggagtggctggataacctggccagaagggaacaggctctttatctggagccgggactctggatagcgatggaacagagggaagagtatgaaagaatgcttgccggggaagcgggagcggaggaaccgggctgccatatagtgcggagaatgctgtattaccgcggaggacagaccgaggatgaaatacgggaacggtacttcctgacaaagccgtttacaaaaaagcttctggaggagcttcaaagccgggagagcatcgtaaaggacggggaagtctattaccattccaggctgtatgaccgggccagaaatagaatggtaaagagcctgcgcctccagacggtgacaagaccgcctgagagctacgcctccttgatggccgggcggatagagctgcatgccccggcagaggaacagctgaaacgcgcaatggaacaatgctgtgataaaaatcttccggtcaggcagtgggaatccgtcattttcagaagacgcgtgaaaaattattcggagacaatgctggaccgccttctggcccagggagattatttctggaagatggcgccggatggaaacttgagtttccaccgatatgacgatatcgactggggcgccggtctgccggaggcggcagaggaactggaaggggacgaactgcttttgtaccgggagttaaaaaggcgcggcgccagctttcttaaatttctgacgggaattccaaaggaggacagcgcccaggaggtacttctgaaactggctgccaaaggcctcgtctgtgccgacagctttgtgccggtgagacaatggcagaacagggagaaaatcaggaaagcgccggtcagacagcgtgttaacgcaagggtcatggcgctgtcggccgggcgctgggatattgtgcggcccgtccgggaaaaaagcagggaagaactgcttctgcggtatttcacagaggcagttgttctatgccgggaaaccttcctgaaagcctctatgggggatgaatttacctggcgcgaggcgctggaaatcctccgcgtctgggagtacacgggaagagtcagaagagggtactttatcgaagggctgtccggagcgcagtttatcagaaaagatgattacgaggcggtcaccgctttattacagaagtccgatgaggagcttatatggctgaatgcgtcagacccggcacagatttggggcaaaattttaaagcagccaaaggaacgggaatttatgattcttccgggaaccgcagttgcgctgctgggcggacttccggcggcagttcttgaaaagcagggaaaaaccctgagagttttcggggatgacgcacaaagcaggctggatatcatcctgtccggactggtacgggatttcagggaaaaaaagctgttcgcggaccaaaaacggctgattgtgaaggattatccaaaatacgccggagacagcctgaaaaaagcaggtttcattcacgaaatgcaggactatgtactatattggccgtaaaaataatatggacagcgcagaggcaatacggatataatttaaaaggccataagacctaatcgtggtcttatggcctttcccaggggaagccgctaaatctttacatcagtttcagttaaacgcgttctatcagcctccaaagccctgtacaaaggtcttgatgaaccagatagtggttggctgataaatgatatcaaccaggaaagcgcctacgattggaacgatcatcattgctcttctggacatgccgtaacgctcgtttacggcagtcatgttaacgatagcggaaggtgtggctccgagtccgtgtccgcataaaccggcgcacataacagcagcgtcataattcttgccgaggatacggaatacaacgaagtatgaaacaagaatcataaagattacctgagcgaatacaacgattgccactccgccgatgaggcccgacagttcccagagcttcagcgtcataagagcaagggagagatagaggcttaacatgacatcgccaattccctctaccagaggatagttgaaattgtacattctgaatttctcattcaggttacgcaggataacggcaacaaacatggctccgacgtaagttgggaaggacatgctgatcagtccgctgacccatttggaaaccatggttccgagcgccatacaaacgagaatagccgtcacgtttttgatgatatccagaccggaaagcttctcgccggtatcggcgttgatgctctctacatcggtcgcaaagttttcattctcatccggttttaaattgtatttgacgatcagacggcgtccgaccggaccgcctactaatacggctgaaatcagaccgaaggtggcagccgcggcgcctactaaaggagccgtctcataacccatctctgcgaacgtgctgccgtaggataaagcagcgccgtgtccgccgatcatcgagatggagctggagagaagcgcatagggagcttcaaggccgatcactttagaaatgccgataccgattgtgttctggaaaatggagattactccgcaggtgagccagtatacaatcagaagcacgccgccctttttcagcagggcaaagcttgcaccaagtcctaccgtggtaaagaaagccagcatgaaaggatcctggaatgtgttggtgaagttaaaagtaaagcttccggtggcatgtccaatccatgtaataaacataaaaaggaatccgccgactaccggagccgggatacaatacctgtcaaggattgtaagtttgttcttgataaaatagccgataaccagaaggacagcggccatcgccagcgtcataatagcatcggtgttaatgttgagaacattttcaatagtttcaaacgtcattctacctacctccaattttgaaattctggtgtacttacttaaatttataagtgtcttatgtacatcaagctgcaattgtttcccttcccctgtgaagaaacaataaaaaccggtattataatccatataattatgtataataataccagtcagcctgatttcattataaaatatccggccataaagcacaagatacttcgttagtattaagaggggaatgacggtaattttgttaaaaaaaagtaacagttgaatcgccgagaagaaagcggagcaaaaaataagtataaaagtgtaaacaattaaaataacaatttacatgaaaagaagaatgtgatataacaaaaaatggaaaaaggcaggccggatttccccacagagataaaagcgctgttttatggcaggtatcaatgccgttttacgccgcataacccggaagtttcgcaaaaaacagcgaaaacaccacgcggaatgcattatggcagaactgctgctgcaaagataccataataggaaaaatcatattgatttatagaatgatatttagtatattattgtatagattgtggcattcttgatagatggggataaacgtatgcctttatttatgtctgagaatgcgtcggcaaaggagaaattggcatgatcaaagtagcggtagatgcaatgggcggtgacaacgcaccggaggagatcgtcgcaggagccgttatggcggcgaataccagaaaagatataaaaattcttctggtcggtcaggaagaacgtgtatcagcggaattaaagaagcatacatataatactgatcagattgaaattgtaaatgcaactgaagtgattgagaccgaagagccgccggtaaatgccatacggaagaaaaaagattcttccattgtggtagggatgaatatggtacgccgcgatgaggcggatgccttcgtctcagcgggaagttcaggtgctattctggtaggcggccaggtaatcgtcggaagaatcaagggagtggagcgtcctcccctggcaccgcttattccgacggagaagggagtgtccctcctgattgactgcggcgccaatgtggatgcaaggccgtcccatctggtacagtttgcaaagatgggctccatttacatggagaatgtggtaggtatcaggaatccgcgtgtggcgattgttaatatcggagccgaggaggaaaagggcaatgcactggtaaaggagacgtatccgctgcttcgcgaatgcggggatattaattttaccggaagcatagaagccagggagattccccatggagaggccgatgttatagtcgctgaagcgtttaccggcaatgtcattctaaaactgtacgaaggcgtgggcgcgacattgatagccaaagtaaaggccggtatgatgaccagcctgcgttccaaaataggggccttgttagtcaagccggccctgaaggaaacgctgaagagcttcgacgccagccagtatggaggagccccgctgctgggactgaacggcctggtggttaagacccacggcaattcaaagcggacggaagtatgtaattctataatccaatgcgttacattcaaagagcagaggattaatgaaaaaatgaaagagagccttttcccgaaggaaaaggaacaagaagaaaggtgagagaggaaggaagactatggaatttgaaaaattacagcagatcattgcagaggtattaaatacggagccggacgagatcacaatgaacacgacgtttgttgacgatttgggggctgattcacttgacatctttcagattatcatgggcattgaagaagaattcgatattgaaatcccgacagaatccgcagagaagatcgtaacggtacaggatgcggtagaacagatcaaaaatgcattaaattaataaaggtttgccggagcagccctggggacggggctgcttgtgttattgttcacggcactgactcaatacagcccattaaccgggcggaaaggaaaaatatggacaaaaaactgatggaactggaagaaaagacaggctatcatttcaacaacagagagctgctcggccgtgccatgacccacagctcctatgccaatgaatgccacaaaagtaaattagagtgcaacgagcggctggaattcctgggagatgccgtactggagattgtgtccagtgactttctgtttcacaaattcccggacatgccggagggggatttgacaaagactagagccagcatggtttgtgagcctacgcttgcctactgcgcggaggaattgtcactcggtaaatatctgctcctgggaaaaggagaggaagcgaccggaggaaggaacaggaactcagtagtttccgatgcgatggaggccctgattggagccatttatctggacggtggttttgctagtgcaaaagagtttattcacaaatttattctgaatgatatggaacataagaagctcttttatgatagcaagactatcttgcaggaaattgtacagagccggtgtgaggaagggctcagctaccagcttctcagggaggaaggcccggatcataataagatgtttgaagtagcggccaaaattggtgagaaggagattgggcgcggtacaggcaggacaaaaaaggcggcggagcagcttgcagcctaccgcggtatactaaaaatcaggaaatcataggtggaatatgtatttaaaaagtattgagatccagggattcaagtcatttgccaaccgaatcctgtttgaatttcataacggtatcaccggtatcgtgggaccaaacggcagcgggaagagcaatgttgccgatgcggtccgctgggttctgggagaacagcgtatcaagcagctgagaggcggctcgatgcaggacgtcatattctcaggaacacagatgcgcaagcccagggctttgcctatgtggcgattacactggacaattccgaccataagctgccaatcggctttgatgaggtcaccatttccaggcgtctttaccgctccggggagagtgaatataagattaatggcagtacctgccgtttgaaggatatcaatgagcttttttatgatacgggtatcggaaaagaggggtattccatcattggccagggccagattgacaagattttaagcgggaaaccggaggaacggcgcgagctgttcgatgaagccgcaggcattgtcaaattcaagagaagaaagctgattgcacagaagaagctggaggacgagaaacagaatctgctgcgcgtttccgatatattggcggagctggaaaagcaggttggccctctggccagacagtcggaggcggccagggaatatctccgtctgaaggagagtctgaagctctacgatgcaaacctgttcctgacggagtcggagacccttaagggccagcttaccgaaattgaaggaagagaagttgttgtaaccggcgatttggagactgtgagaacggagtcggaacgtcttaagacggaatatgatgagctgagccaagaactggaagggcttgagaacctgattcaggaagagcgtgacgctatgagccgggccgtactgatgaaagagagcctggaggggcagattaacgtcctgggcgagcagatcaacacggagcggatgaatgaggaacatattaagagccgcatcagctccatagagaatgaaattgcggcgagaaccagccggaaagaagagtacgaaaaggagcgggaggaactgtcccgcagtatcagggaagtcgccgggaactgtcctgtgcggaaaaagagctggcggaaaaagagcaggaaattctggactttgagacgctgacggaggatgccaaagcggaaatcatacgcgctctgaatgagaaagccggcctggcagccaggcagcagcgctatgcgaccatgcttgaacaggtggatgtgcgcagggcggaagtcagccaaaagcttttgaagtttaaaagtgacgaatcaattcaggatgagcagattaaggaagaggaaatccgccttcatgagatagaggcacacctgacggagcttgccggacgcgaaaacgcgctggtatcggaggctgagggcgccgacgaagaggtgaaacggctgggaaaacggctgaacttcacacagcaggagtatcataaaagctacacaaagctggaatccttaaagaatctggcagagcgctacgacggctacggcaacagcatccgccgcgttatggaggtcagggatcgtgtggtcgggatacacggcgttgtggcggatattatttccacgacaaaagaatatgagacggcgattgagacggcccttggcggaagtattcaaaatatcgtaaccgattcggagcagacggcgaaacagctgattgaatatctgaaaaaaaataaatacggccgggccacatttcttcccctgacgagtgttgctgacagaggttcctttaatcaggaaagcgcgctcagggaaccgggcgttctggggcttgcaagtgatttggtgacggtggataaacagtaccggggactggccggttatctgctgggccgggtgattgtggccgatcatattgacagcgccattgcactggcgaaaaaatataaacactctatgagaatcgttactctggagggcgaacttctgaatgcaggcggctccatgacaggcggagctttcaaaaacagcagcaatctcctgggcagaaaaagggagatagaggagctggaagaaaactgcgggaaagcgcttgtgctggtggaagagatacaaaaagacctggcgctgaatgaaggaatactggaagaagcaaaaggggagcttgagaaaatcagggctgagaaacaggccgcatacctggaagagaatacggctcagatgaacctttcaagaatggaagggaaaaaacgagagattgtggaatcttctgcagatctggttgctgagaaccgagagctggaggaacagttaaaagaactgaaggagaaccggacccggctggaggaagaggcgggacgtctggaagacctgggacttttaaaaaaccgggaagtggaagaatacacagtcaggctcgagatactgaaagaggagagggagcagaaggcgtcggctctttctcaggtgcagcttaaggcggcccaggtaaagcagcaggacagctttactcttgagaatataaaacgcgtccgcgaagaggctgaaaagctgttgcttgaaaaagaagagctgacggcgggggaagcggcagcagccaggctattgagaaaaaacaggcggaaattgaaagcctgagggcacagatagaagaggctcttagcacggccggaaaactggaacaatccatggccgggaagataaaggataaagaagaaaaaaccggcaggcagaagtccttttttgataaaagggaagggctttcggagcggatgaaccttcttgataaggatttgttccgtcttcagaaccagaaggaaaagctgtcggaacggattgaaaaccagacgaactatatgtggagcgagtatgagctcacctggtccactgccgaaaagctgaggcaggaggagttaaactccgtaccggagatgaagaagcagatagagcagttaaagtcacagatcagggcgcttggcagcgtcaatgtcaacgcgattgaggattataaagaagtatcggaacggtacgaatttatgaagacccagcatgatgatctgattatggctgaggagacgcttcttaaaatcatcgatgaactggattccggaatgcgcaggcagttcgaagaaaaattccgcgaaatcaggatggaatttgacaaggtattcaaggagatgttcggaggaggccacggtactctggagcttcaggaggatgaagatatcctggaagcgggaatacagattatctcgcagcctccgggcaaaaagcttcaaaacatgatgcagctttcaggcggagaaaaggcgctcacggcgattgccctgctctttgccattcagaacctgaaaccatcgcccttctgccttttagacgagattgaggcggcgctcgatgattccaacgtggatcgttttgccgggtatctgcataagcttacaaaatacacacagtttatcgtcatcacccaccggaggggaaccatggtcgcttcggatcgcctttacggtatcacgatgcaggagaagggcgtgtcaacactggtttccgtaagtctgattgaggataaactggaagcatagtaacagttcattctgtctgggctgctacagcataatgtacataagacggaccgcaacgcaatctaagatgcaggatataatcgtaaccgcaatagtattttaaggaggaaactggagatgagtgaaggaaaaaagggctttttcggccgtctcgtagaggggcttacaaaaaccaggaattccattgtatcgggaattgactcgattttcagtggcttttccgccattgatgacgatttttacgaggagatagaagaaacgctgattatgggggatttgggaatccagacgacgatgtcgatcgtggaggatctgcgccggaaggtaaaagaaaaccatatcaaagagccgtcggaatgcaaggatcttctcgtggccagtatcaagagccagatggatctggggaaaacgcctatgaatttgagagacaaaagtccgttgtacttgtgataggggtaaacggtgtcggaaagaccacctcggtcggaaagctggccggccagttaaaggatcagggcaagaaagtaattcttgcggcagccgataccttccgcgcggcagcgattgagcaattgacggagtggtccaaccgtgccggtgtggaactgatagcccagcaggagggctccgatccggcggccgttatctttgacgccattgccgccgccaaatccaggaatgcggatgtattaatctgtgatacggcaggcaggctccataataagaaaaatctgatggaagagcttaaaaagattaaccggataattgacaaagaatatcccgacgcctaccgggagacgctcgtagtcctggacggcaccacgggccagaatgccctgtcccaggcaaagcagtttatggaagtagccgatattacaggtattatcctgacgaaactggacgggacggcaaaaggaggtatcgctgtcgcgatccagtcagagcttggaataccggttaaatacgtgggaattggtgaaaaaatagacgatttacagaaatttgacgcaaatgattttgtaaacgctttgtttaaaagaccggaggaaaaaacagaatgagcggggaatacgaagagcaggtaaaaggagaaaagatggaagatatggaagagaaggaagaaaaattgacgctggagaaatttgaggaggcaacggaagccgtctcaaaggtaatatccgagacaaagctggtgtacagtgagcatttttccaatatgaccggaaacaaggtatattttaaacctgaaaatatgcagtatacgggagcctataaggttcggggcgcctattacaaaatcagcacgctttcggaagaggaaaaaagcagagggctcatcactgcttccgccggtaatcacgcacagggagtcgcttatgcagcgaagctggcgggcgcgggagccgtgatcgtcatgccgaccacaacgccccttatgaaggtcaacaggaccagaagctatgggccgaagtggtactccatggggacgtatttgacgaggccctggcccatgccaacaggctggctgccgaaaagggttatacctttatccatccttttaatgatctggatgttgccacaggtcagggaacgatcgcgatggagattatcaaagagctgcccacggtagattatattctggtaccgatcggcggggaggcctctgtaccggggtggcaactctggcaaagcttctgaatccgaagattaaaattatcggcgtggagccggcgggcgcaaactgcatgcaggaatcccttagggccggaaaggttgtatcccttccttcagttaacacaatagcggacggcactgcagtgcagaccccgggagaactgctgctcccatacatacaggagaatgtggacaaaatcatcacaatcgaggattccgagctgattgtcgctttcctcgacatggtggaaaaccataagatgatcgtggaaaattccggccttctgactgttgcggccctgaaacatttgaatgtcaataagaaaaagattgtttcgattctgagcggcggaaatatggatgtaattacgatggcttccatcgtccagcacggcctgatccagagggatcgtgttttcacggtttccgttctgcttcccgacaaaccgggcgagcttgcaaaggtttccactcttatggcggcagagcaggggaatgtcatcaagctggaacacaaccagtttgtcagcatcaacagaaatgcggctgtggagcttcggatcacggtagaggcattcggaacagaacataaagagaagattgtagatgcgctgaaagccgccggctaccgtccgaaacttgtcaaatcaaaaggaatctatgaggcatagactggattaaaacggcggtccttcgcggatggtatcagggtgcggatgtgaatcatgaagcggagaaccgcagttaaaaaggggaaatgggtatgtatcaatttgacaagaatacaccgtttggcaaaaatctgcattactttgccaaatggaccgtgatatccgttctcatcggactggtaacgggactggttggaactgttttcggccatgcagtgctatgggtatcctcgtatttcaggaataatccatggacgatactttttctgccggtctgcggacttttgataacgggtatctaccatattttgaaagaagataaaaaccgcgggacaaatatggtaatcgaatctatccattcgggcacggaaatcacctttggcacggctccggccgttttcctgggaacgcttctgacccatatcagcggcggttcctccggccgggagggcgccgccctccagttggggggaagcatcggaaaccagattggcaaggtgatccgcctggacgaaaaggatatgaaaattgcggtcatgtgcggcatgagcggggcttttgcggctctgttcggaacgccgatggccgccgccgtgttttcaatggaagtaatcagcatcggcgttatgtattatgcggctctggtgccctgcattttttcttcctttatcggagccgcaatcgcaaaacatatgcagcttatgccggaggcgtttgccatcggggaagtgcccgcattcgatttgaaaatggctgtaatcataattattctcgggatgctctgcgctctcgtggctgagctgttctgcatcacgctgcgagggacggagcatacgttcgtaaggcaccttccgtcaccggctaagcggatattcgtgggagggctgcttgtaatcgccctcactctgatggcgcggacaacggcttataacggaagcggtatccgcctgatcgaaatgtgtttcgaaggagaggtcgattacgctgctttcctctggaagataatttttaccgccattacgctggaggccggttttaagggaggtgaaattgtccccactctgacaatcggagcaacctttggctgtacctttgcgatggtgacgggccagcctcacgggctgatggccgcctgcggaatgctggctctctttgtgggggttaccaactgtccgatttccacgctgttaatagggtttgagctgttcggctactcggcgatgccgtattttgttattgtaatcgcggtcagtttcactctttccggctactacagtctttactccagccagaaattcgtatattcgaagactaaaacagaatttatcaaccgtaagacgaacgactttatcccataccagagaaagaagattacatcacctgaggaataggggcaataagccccacagcccaaacggagggaactgcaataatgaaaactctaattcgaaacgccacagtcctcacaatggataaggaaatgcacatttattccccgggctatgtgttgaccgtggatgagacaatcaaagaactgggatacgagagtgcagctcttccggatgcagacgaggtaatagatgccggaggaggtattgttctgcctggatttatcaacacccactgccatgtcccgatgatgccgtttcgctcactgggcgacgattgtcccgaccggctgcgccgcttcctttttccgctggaaaatgaagccatgacaaagaagctggtgaagctgtcttcaaggtacggcatttctgaaatgctgctggcgggtgtgactgcttttaccgacatgtattattatgaggaggaagtggcaaaggcctgtgaagaactgggcatccgcggagtcctcggtgagacggtgatcggccagaaaacgtgtgacagtgaggagccttacggagggcttggcctggcggaagcatttataaaggagtggaaggggcatgagctggtcactcctatcatagctccccatgcgacaaacaccaacagtccgcagatgcttaaaaaggcatatgatatcgcagaaaaatacgatactctctgcactctccacgccagcgaaatggattatgaattaacttattttcaggagaagtacggccggacaccgatagaatttttagaagcaacaggggtactgggcagccgtctcctggcggcccactgcattcatctgaccaaagaggatatcagactgctggctgccggcagagtttcggtcagccactgtatcggttccaacacaaaagcaggcaaaggcgtcgctccggtcagggagcttctcgaagcgggaatcccggtcggccttggaacggacggggcctcctccggaaacactctggatctcttcatgcagatgcgtctgttcgcctccttccataagacggtgaaccatgacaggagtgtatttccggcaaaggagattgtgagactggcaacctgtgaaggagccaaagccctgcacatggaaaagacagtcggttcactggaacccggtaaaaaagcggacattattcttgtagagacagattccgtcaatatgttcccatgctacgatccctattcagctctcgtttattcggccaatccctcgaatgtggatacggttctcgtaaacgggaggatcctggtgcgcgggaaaaagctgaggcatgctgatttgagatgtatcagagaggaattggatgatgccatgggggcctttcgcagggcggcagaaaaatggagatttagttaagcaggtgaggacgccgccggtatggccggtggacgggggtggggtgtgtatatgagtctttcgtcccgggggttttgcatcgctggatggagaaggagatactgtggttttgttttcgcagggcggagccggagagaatgatatccggctggactgcttcttcgagggatagctctaagacagaggaaggcaaagccccccggggttacggacaaattcgctccgaactccgaatgagttcgaagctcaagttgtcccggattttgcccttgtagggctaaaatccgcccggcgcgctttgtctccctctgcctaagagctatcgtctctcgggcgaacgtccttccggatatcattctctccttctccgccggaagatgtcggcagtatctccttctcccggaaggttttcgccggaacgaaagactccgccgggtgtatcggccccgtccgctggcctgcggccgctgattgtctcacgcgttaagtgcggggggggggggggcggaccttgtcgaggccactcagtgctaccgtgtgtgggaaatacgatatgccttcaatacgccttttataaataattgtggaggatttgatatcggcctgccggaaacacgtagtggccgcgacagggtcctccccatttaaggttagagacaatcagcgcccggaacggaccatgtccggtgccgcgaaaacctccgcctgagtcttttgccctcggcgacaacctgaccaggggaagtaggcggaatcaattgcggaggggacatgggagtccgccggtgcttagcgaggtccctcacgagcttagcactgctgcgcactccaaagagtgcaaacggtccccgcagcaattcgttccggccggatttccccttacgacaacctccaaccggggacaaaagactcagcccagcctcctcaccacaccggacatggtccgttccggccgcgtcctcctaacctccgttaaatattaatttatgaaatttttatcgcacaatcccatcttttgtggtagaataacaatgttaaagtatggcatagaaaattatgccgtttacaactaaatacacagggagaaagacctattatggaaatgaaacgagtattgcttaaattaagcggtgaagctctggcaggcgataagaagacgggctttgacgaagcgacggtaaaggaagttgcccgacaggttaaaatagcagtttccgaaggcatcgaagtcggtgttgtcatcggaggcggaaatttctggaggggccgtgagagtaatgccattgacagaacgaaagcggatcagattggcatgctggctactgtcatgaactgcatctatgtgtctgagattttccgaagcagcggaatggacacacagatcctgactccatttgagtgcggctccatgacgaagcttttttccaaagacagggccaataagtactttaagagagggatggtagtgttttttgcaggcggtacaggccatccgtatttctctaccgatacaggagttgcccttagggcgattgagatggaggcagactgtattcttttggcaaaggccatcgacggcgtttacgacagcgatccgaagctgaatccggctgcgataaagtatgacacaatttccattcaggaagtaattgataaaaagctggctgtagtagatttgacggcgtctatcatgtgcatggagaatcatgtgccgatggcggtattcagccttaatgaggaaaacggcatcatcaatgcgatgcagggaaaaataaatggtacggtagttaccgcataacaggaggtttatatgcaggagaagattaaggtttacgaagaaaagatggtaaaatcatatgaagttttgttggatgagtatgcctccatccgggcaggcagagcaaatcctcatgtgcttgacaaactgagagtggattattacggcacaccgactccgcttcagcaggtagctaatgtctccgtaccggaaccgagaatgattttgatccagccatgggagagaaaactgatcaaggacattgaaaaagcaatcctcacctctgatctgggcatcaatccgaataatgacggcaatgccatccgccttgtcttcccggaactgacggaagagcggagaaaagaactggcgaaggatgtcaagaaaaagggagaaggcgttaaagtagctgtccgcaatatccgccgtgatgccaatgatgcgatcaagaagatggagaaggcaggagaaatttctgaagatgatcaggctgaaggcgaggagaagatccagaagattacagacaagatgatcgagaagattgataaagcggtagaggcaaagacaaaggaaattatgaccgtttaatcttttcggttcggagagatttaaccgcataacagggggcaggtaatctgcccctgattttacgttaattgacggtgagaggctaaacacacatcggaggaaatgatggaaaatacagataaaattataacagaggagacgaacctggttattccggaacacgttgccctgattctggacggcaacggccgctgggcgaagaaacgtggacttccgagaaccgcaggccataagcagggctgcgtgacagtggaacagacggtggaagacgccgcgagactgggtataaagtatctgaccgtgtatggtttttcaaccgagaactggaaacgctccgtcgaggaagtgggagcgctgatgcagttgttccgttactatctgaaacggcttttaaaaattgcaaaatcaaataatgtcagagtgaaaatgatcggggacagaacccgtttcgatagagatatcattgaaggaatcgatacactggagagagagacaaaaaataatacgggaatgactttcgtgattgccgttaattatggaggaagggatgagatcacaagagcgatccggcggatgacggcagactgtaaggaaggccgtctcgattccggctcagttacggaacaggtggtttcttcttatctggatacggcagatatcccggatccggatcttttgatccgtaccagcggagaaatccgcctctcgaattatcttttatggcagcttgcgtacagtgagatcgttgtgacagactgcctgtggcctgatttcaacaaagaagagctattaaaggccattgcccagtataataagagagacagaaggttcggcggggtcaaatgaaaatgaagcacgcctgaattacctcgcaggaggatggctgcaaagcggatgcagcttacgaatacctgtcttgtcggcaggtgagttgagggaggaggagccatgttcagaacaaggctgatcagcggtattatactagtaattctggccgtgattgtagtcagtacgggaggtgcccttctgtacggcgtcactgcggttatttcactggtggggatgtttgaattataccgtgtaatgggtattgagaaaaaaagtctgggacttgtcggatatctggcggggatatcgtattatggcctgctgtggttcgacggacaaaaatatgtgacgttgatggcgattgcagccctgatgctgcttatgacaatctatgtgtttacgtttccacactacgggacagaacaggtgacggtgtctttctttggcatcttctatctggcagtgatgctttcctacctgtaccaggtgagggagatggcggacggaagatatctggtctggctgattttcctgagttcatggggatgcgatacctgcgcctattgcgccggaatgctgtttggcaggcacaaactgacaccggtgctgagcccgaaaaagacgatagagggagccgtgggcggaataataggggcggctgtcctcggattcatttatgcatccatattcggccacaggatggatgagattggcaatccacaggcagcttgtgcggcagcctgcgccatagcggcggtgatttctcagataggagatctggcagcctccgcaatcaaaaggaaccataatgtaaaagattacggccatctgataccgggacacggcggtgtgctggaccggtttgacagcgttatatttacggctccggctatcttttttgcgctgacatttctcggttaacggctgacggaagggacaccaagattctgtcagacaggtacaccggccggaaaagatgcatagaatactggagccggttcaataataactgaagatatcaaaaagtaacagtgagttaagaaaggcagacatctgcgatgaaaaaaatagctatactgggttctaccggttcaatcggaacacagacattggacgtggtcaggacgaataaagatatagaggtgactgcattagccgccggaagcaatatatcgcttttggaaagtcagatccgggaatttacaccgaagctcgccgcagtctgggatgagaagaaggcggctgaacttaaaagccgggtgcgagatctcgatgtgaaggtggtaagcgggatggaaggccttctcgaaattgccgcagaaccttcctcggagattctggtgacggcaattgtaggtatgattggcatcaggccgaccattgcggcaatggaggcgggcaaggacattgccctcgcgaataaggaaacgcttgtgaccgcaggccatatcatcatgccgctggcaaaagagaagaatgtcaggatactgccggtggacagtgaacacagcgccatattccagagcctgaacggcgagcatggaaacaggatacataaaatccttctgactgcatcgggcggcccgttccgcaaaagaacgagggagcagatgaaggacattcaggtggaggatgcgcttaagcatcccaactggacgatgggcagaaagataacaatcgacagctccacgatggtgaacaaggggctggaagtgatggaagcaagatggctgttcggcgtcacgatggagcaggttcaggttgtggtccagcctcagagcgtgattcattccatggtggaatttgaagacggagctgtaattgcccaattgggaactccggacatgaaactgccgattcagtatgcgctttactacccgcagcggaagtttttgcccggcgggcggttagattttgccaaacttgggcagattacctttgaagcccctgacttctgcaattttcacggcctttcactggcctatgaggcaggaaaacgcggcggaacgctgccgaccgtatttaacgcggcgaatgaactggcagtgaaaaaattcctggacagaaaagcaggatacttagcgataaccgatatgatcgaggctgcaatggagcagcacagggtagtggaaaatccgtcggtggatgagatactttccgctgagcaggagacttatgactttatagagagcaggtggtagattgttaagtttacttgcggcaatacttgtatttggactaatcatactttttcatgaattcggacactttctgctggcaaagcgcggcggaatctgcgtagtggaattttctctgggaatggggccgagactgttcagcatggtcaaaggcggtaccaggtattccctgaaactgtttcccttcggaggctcctgcatgatgctgggagaggatgaggatttatccgacgatgacagggatgagagggccggaaaaaatattgccggtaaagcagcttacggggaggatgagtttaaagatacaaaagccgcttcccataaggaagcggagcagacacgaagctacgcgggggtagaactggcgccgggagcaaccggagtgacatttaatgagacatcggtgtggacccgatttcttgttattgcggccggaccggttttcaactttattctggcatttgtctgtgcattctttgtaatcagctatgtgggctacgatccggcggaagtttacagcgtcgtggagggctatccggcggctgaggcaggaattgagccgggcgatgtgattacacagatcaacggcaagaacattaagatatacagggacgtactggcttataccagcttccaccagggagagacactgaacctggaatacagacgcggcaatgaacttcatcaggcggtgattgagccggtatattccgctgaaaacggaagctatatgatgggaatcagcggcggagtctataaaaaaccggaatccgtatttgtgacagccaaatacagcgcgtatgaactgaggtactggatcaatctgacgtttaagagccttgggatgattgtgaaacgccaggtaaagacggatgatatagcaggccctgtgcggattgtttcgatgatcgattccactgtcagggagagcagcgaatacgggctgatggtggtgcttgtcaatctcgccaatatgtgtgtccttttgagcgcaaaccttggcatcatgaatctgcttccgattccggccctggacggaggacggcttgtctttatcattctggaagcgctcagggggcggccgatcgaccgggaaaaggaagggatgatccatatggccggtatggcggttcttatggtgctgatggtatttatcctgtttaatgatatcagaaacatgctgtgataaagtagaagttcagagataccggggaggttagtatggcgtacagagatgagacaaaaacggttcagattggaaaaaaggtgatcgggggaggaaacccgatcctgatccagtccatgtgcaacacaaagacagaggatgtgaaagcgacaatcggccagatcctggaacttcagaacgctggctgtgatattatccgcgtggcggttccgacgatggaagctgcaatggccctgaccgagattaagaaggcaatcaggattcctttggtggccgatattcattttgattaccgtctggcgattgcagcgatagaatgcggcgctgataaaatccggatcaatcctggcaatatcggtgcaaaagaacgcgttcaggccgttgtggataaagcccgggaatacggcgtccctattcgtgtgggcgtcaacagcggttccctggaaaagcatctgctcgaagagtacggcggcgtgacggcggagggaattgtacggagcgccctggaaaaggtggcgttgattgagcgcatgggatacgacaatctcgtaatcagcatcaaatcctcggatgtcatgatgtgcgtaaaggctcatgagctgattgcaaagaaaaccagatatccgctccatgtcggcatcacggaggcgggaacgctgctggcaggcaatatcaagtccgccgttggcctgggcctgattttaaatcaggggatcggagataccatccgtgtctccctgaccggaaacccggtggaggaagtgaaatcggcaaagctgattttgcggaccctggggcttcgaaagggaggggttgaggtggtatcatgccctacctgcgggagaacctgcattgatctgatcggtctggccggccaggtggaaaacatggtccaggaatatgagctggatatcaaggtggccgtgatgggctgtgtcgtaaacggcccgggagaggcaagggaggcggatcttggcattgcaggcggcatcggggaaggactgctgatccgcaaaggtgaaatcatcaaaaaagtgccagagaaagaccttctgcccgcactgaaagaagagcttgacaggctggccggaaaactggaataatagagctgcagggtgaaaaagaaattaaggtgatggaatgaaatcgtttttggaagtatttcctgatttacatattgcagataatgtgagagagctttttgagctggtagaggtggagaaggtggccactaccagggatagaagctctatccgcatttatatcgtcagtcccagactgattcataaacagaacatctataagctggaggaggggattaagagccagctcttccccggaaaaaaggtgacgattaaaatcctggagaaatatcatctctccggccagtacacgccgaaaaagctgatggatgtttaccgtgacagcatcctgatggagcttaagaattacagcattcttttatacaatatgttccgcagggccgttctctcttttgacgagaaggatcttctgaccatggagatcgaggatacgatgatagcaaaggacaaggcgccggagcttgtgaggatcctcgaaaagatctttacggaacgctgtaacattccgatggaggtcaggctgtcctaccgcccggcagaggccagaaaaagggtggaggaggagcctgccgtcatctatatgaacgcggagcatacatccggcggcgcagcgccgtctgatccggctccggtctccggggaggcctccctggatcttccctttgacgagggcagctcggtcttaaagccggtgggcgatttgaatttccaggcggagaagaaacagaaagcagttaaggaaaccggcggaaagaacgcccagtcaaaagcgggaggcgatttaagcggcaaaaagggcaaaggcgattttagcggcggaaagagggaattccggcgctccggctacggcagaaagtcggataatccggatgtcctgtatggccgcgattttgacgaagagtcggttgagattgagaagatagaaggggagataggtgaggtggtgatccgcggaaagatactcgccacggatgtgcgtgagcttcgcagcggtaattccctctttattttcagtatcagtgactttaccgatacgatcagtgtcaaagtgttcgcccgcgaggagtcacttgaggatttgaagactgcgacaaaggccggccagtttgtcaggctgaaaggcgtggcgaacatcgaccgtttcgacggggagctgaccatcggttctgttgtgggtattaaaaaatgcgaggattttacgacgaaacgcgtggacaatgctccggtcaagcgtgtggaactgcactgccataccaagatgagcgatatggacggcgtttccgaggtaaaggacctcattaagcgggccaaacagtggggaatggacgcgatggcggtaacggatcacggctgtgtccagtcctttccggatgccaaccattccgtggagagaggtgataatttcaaggttctttacggtgtggagggatatctggtcgacgatatgaaggaactggttgaaaacggtgcgggacaatccctggatcatacctgtgtggtcttcgatatcgagacgaccggcttcagccctcttaagaaccggatcattgagataggcgcagtcagggtggaggagggacggattgttgataaattcagcagcttcgtcaaccccgacgtgccgattccctttgagatagagaagctgacgggtatcaatgacaacatggttctggatgcgccgaagatagacaaggttcttcctgaatttctggagttttgcaggggagccgtcatggtggctcataatgccggttttgacatcagctttattaaagagaatgcaagacagcagggacttgagtttaatccgaccgtgctcgacacggtatccctggcccgcgttctccttccgaacctcaaccggtttaagctggatacggtagcaaaagagcttaagattaacctggcaaaccatcacagggcggtggacgatgcaggggcgacagcggaaatctttgtccgttttataaaaatgctgaaggaacgtgacatttttgatctgtcccagttaaatgaactcagcaggatgacggtggaaatgatacggaagatgcccacctaccatattatcataattgcgaaaaacgatgtggggcgcgtcaatctctaccgcctcgtatcagagtccaacctgacttattttgccagacgtcccaggatcccgaagagcctgcttagccagtaccgggagggccttatcatcggttccgcctgcgaggcgggggaactctaccaggcgcttttacgcggtgtgcctgatacggagatacataagatagtggatttttatgactatctggaaatacagcctctgggcaacaatgcatttatgctcagggatgagaaaagtccggtgaattccgaggaagagctgatggatttgaaccgcaggattgtgggtctgggagaacagtataataagccggtctgcgcgacctgtgacgtccatttcctggatccggaggatgaggtttaccggagaatcatcatgtcgagtaaaggattcaaggacgccgacgatcaggctccgctctatctgcggaccacggatgagatgctcagggaatttgagtatctggggagcgacaaagccgaggaggtggtaatcaccaataccaggaagatagcagccatgtgcgaaaggatagagcctgtccgtcccgataaatgcgctcctgttattcccaactcggatgagacgctgagaagcatctgttataacaaagcccatgaaatgtatggtgagaaccttcctaaaattgtggtggatcgtctggaacgggagcttaactcgataatttccaacggtttcgccgttatgtatattatcgcccagaaactggtatggaaatcaaatgaggacggctatctggtaggttccaggggatccgtaggctcctcgctggtggccacaatgtcgggtatcacggaagtaaacccgctcagccctcattattactgcaccaattgtcattattatgattttgattccgaggaggtcaggaaatttgcaggtatggctggctgtgacatgccggataaaaattgcccggtctgcggggaaccgcttaaaaaggacggcttcgatattccatttgaaaccttcctcggctttaagggtgacaaggagcctgatatcgacctgaatttctcgggagagtaccagagccgcgcgcatacctatacggaagttattttcggaaaagggcagaccttccgtgccggaacaatcggcacactggccgataagacggcttacggctatgtgaagggctattacgaggacaggggcgttcgcaaacgccgctgtgagatagaccggattgtgggaggctgcgtcggtgtgagaagaacgacgggacagcacccgggaggcattatcgtgcttccccatggggaggaaatctattcctttaccccggtccagcatccggccgatgatatgacgaccagaaccgtaacgacacattttgattatcactccattgatcataacctgctgaagctggatatactgggacacgatgatccgacgatgataagaatgctccaggatctgacaggccaggatccggtaaaggattttccgcttgacagcaaagaggtcatgagcttatttcagaacacctcggcactgggcatagagccggaggatatcggcggctgcaagctgggcgctcttggaataccggagtttggaaccgattttgccatgcagatgttaattgacgcccagccgaaatatttttcggatctggtgcgtatttccggattgtcccatggtaccgacgtgtggctgggaaatgcccagacattaatccaggagggaaaagcaacaattcagacggctatctgtacccgagacgatatcatggtatatctgatcggcatgggcctggaagagggcctggcgttcactatcatggagagcgtgcgtaagggaaagggcctgaaggacgaatggattaaagagatgaccgatcacggcgtacccgactggtatatctggtcctgtaagaagatcaagtacatgttcccgaaagctcatgctgcggcttatgttatgatggcctggcgtattgcctactgtaaggtgttttatcctcttgcctactatgcggcgtttttcagtatccgtgccagcggcttttcctatgtactcatgtgccagggccgtgaaaagctggaatatcatctggccgactataagaaaagaatggatacactctcgaagaaagagcaggatacgctccgcgacatgagaattgtccaggagatgtatgccagagggtttgaattcacggccattgacatctttaaagccagcgccaggagtttccagatagtggatggaaaattgatgccgtccctcagcagtatcgacggactgggcgagaaagcggccgacgctatcgtatttgcggcggaggacggaccgttcctgtcaagagaggatttcatcaaccgcacgaaggttacgaagaccgtgtgcgatctgatgggagaactggggcttttgggggatttgccggagagtaaccagctttcgttgtttgatatggtgatgtgatgataccagggtcaaaaggttggaaatctgatgcaagcttgcttgcatgaagatttttaatcttttgaccctggtatcatgtcatttagttaagcaggtgaggtcgctgccgtacggacagcggtggggatgattggatgagtcttttgtcccgggggaggattgtcgtgagttggagctgcggagaagatatagtctgcggatgccccagaggaagattttcaccgggacgaaagcctccgagcctcaattaaatctcaattaattcatattccatagtaccaatcccaagcttttccgcatgttccagcgccactttccagttggtttccggatggatgtccgtaaaatgatcatggtggcagtgctcacgctcatcgagtatacaacctgggattgcaggctgacggtttacggcatcggcacaggccatatcgagggcaaccgggtcaaaggaagcaaacattcctacattcgggatgatagctgcgtcattttcagcatggcagtcacagtagggggagacatccacgacgagactgatgtggaaatgcggcctgtcctttaaaacggcgagggaatattcggctatttttttatttaagatgtcatttgattcatcacaatggtttgcaacggcatctaccggacagactccgatgcagcgtccgcagccggcgcatttatccggtgcgatggaggcctttttctctgcgatggaaattgcgtcgtgtgcacagttgcgcttgcaggctccgcagccgacgcatttatcggtaagaacaaaggggctggtggcgttgtgcatctccagctttccggcgcgggaaccgcagcccataccgatatttttgagcgcacctccgaaaccggtggactcgtgacctttaaaatggcttaaggagataaagatatcggcatccataatggcgcggccgatttttgcctctttcacgtactccccgtcaatcgggacgaggatatcgtcggtacccttcagtccatcggcgatcagcagatggcagccggtggtaaagggattgtagccgtttgtgtaagcggagtctagatgatccagggcattcttgcgtccgcccacatagagggtattacagtcggtgaggaatacctttccgccctgttccttaatcaggtcgacgataactttggaataattcgggcgaagataggccaggttgccgggttcaccaaaatgaattttgatcgcggtatactggtttttaaaatcgatttgctccagcatccccgctttctttacaagacgggccagtttctgaagaagattttcagtaaatgttgccctgaagttagtaaaatatacttttgaagcagacataggatacctcctgatatgtattgattaacgatgaaattatagcataaataagaatggattgctactgttaccgtttatagcaccatgctgccgaaatatccaccatttttattgtatactcgggaattttatggtagactagagactaatttgaacagtattatatattatatgaatgacagaggaggacacaccaatgagccagaaacgttcaattgaaaccacctgtattcagggcggctggcagccgaagaacggcgagccgaggatacttcctatttaccagagtactacatttaaatattccaccagtgaacagatgggaaggcttttcgatttggaggagaacggttatttttacaccaggcttgccaatccgaccaacgatgccgtagccaataagatttgtgagatggaaggcggagcggcggccatgctgacctcatccggacaggcggcaaatttttatgcggtgtttaatatctgtaatgcaggcgatcattttatctgttcttcgaccgtatatggcggaacatccaatctgttcgtcgtgacaatgaaaaagatgggaattgaagtaaccctggtggatccggacgctccggcagaggagatcgagaaggaattccgcccgaataccaagtgcgtgttcggcgagtcgcttgccaatccggccatggttgtactggattttgagaaatttgctgccctggcccataagcatggggtgccgttcatcgtggacaatacctttgccactccgattaactgccggccctttgaatggggagcagacattgtaactcattccactacaaaatatatggatggccatgcgatgagcgtaggcggctgtatcgtggacagcggcaattttgactgggaggccaatgcggagaagttcccggggcttacgacaccggatgattcttaccacggaattatctatacacagaagttcggaaagggagcttacatcacgaaagctacggcacaggtaatgagggatctcggttccatccaggcgccgcagaacgcattccttttaaatatcgggcttgaaacgctgcatctgcgcatgccgcgtcactgtgagaatgcacagaaggtggctgagttcctgaaatcctgcgaggaagtggattgggtaacatatccgggccttgaggatgataaatatcatgagctggcaatgaaatatatgccgaacggcacctgcggagttattgcattcggcttaaaagggggccgtgaggcagccgcggaatttatggataaattaaagatggcggcaattgtaactcatgtggctgatgcccgcacctgcgtgcttcatccggccagccatacccaccgtcagctctccaacgaacagctcctggaagcgggcgtcgatccgtccttaatcaggctgagcgtcggtatagagaatgtgcaggatatcattgaggatatcaggcaggctctgaaataaatatattgaccggcagatagttacatatggaaattttctaatgaataaaagaggctttttccggaaagattcaacttttggttgatctttctaagggagaagcctcttttattatttatattctatgataccagggtcaaaagaccttttggccccaacatcattctattttggtaaaatccggcaggctccggtaatgtgaatttaggagcgttaattctctgctataatattttatgataaaatccggtgcatacagttttgagagcaggccggaaatgatacgaaagagggacttgggatgagggagtgtgtcaaaaagctacgggaagaatggaaaataaagctggcatgggtgatgatttgtacgattcttctccaggctttggcaggatggagagtgattcctgttatggccggtgagacggagaaaagggatttatcaggctatgcgacgccgtcggatgcgtttcagcatttcaatatgtggacggacagggacacggtgtccggaaatgggtttgagctacaattagaactggcatttgataataattttttggaaacagcggttgaagatgcccaaggcgatatcgaaaagtgtccggacctctcttttcagataaaagtggaatgcagcggcttaaataaaaatattaattttcagaatcaggagctgacttatggggatgtcttaatcggaaccatggttacggagcagaatggaacgtgtctcgatatatcgattatctttaacaaagacgacatttacagcggttatcagaatattgagtcaggtgcacaattatccctcggccttgaagcaggccataatggagatgagatagaactggaagacaatcaggaggggattgtcaccgtcaaattgtcgtcgcaaggttccgggcagccagaggataagggagcctattcactggttaaaaaagcggatagcggagacggtttggatatcacctatacaattacagccagggcctcctcctctgaggcgtccctggcccaaaaagctacgccggcgacggcatcttcaggctttgaagatatagatgactgggagacctggcaggccatggatgaggacgaggaagacgaagagtaccaagaggaggacggggacggaacaacaggcagtgcaagtcagctgaagaagaggaagtcctcccggagaaaaatggcagaatcgtcaaaaacctatacattgggcgggaagcacatcatcgatgacgtgccgtccgaattggtggtgacacacgcctatgcagggacaggagatgcgaaggaagaacttctcccgctggaagactattatgatcaggaacatggcaggttcgtttacccgattgcagccagcgcctcagaagcggacgccgggattataacagacagcgccggaaatatcatagaggcatcggttacaattgagacagaaatcagcagcagacttttagaaaactggaatgaacaaaaaaatctggagctgacaattcaaaataaagcaactctgagggatggtgaagatagccagaccagtcttgccgaagcagacacaacaacgaaaaaaacgctgggacaggagctgacaaaagacggacaggagatattaagccagggggagaataaaatccgctggaaaatcaaaatgaaaaccctgcttcataccctccactcggcctatctgattgactggctcggggaaggtcttgaatatgtggatgagattacggtaaaggagggaggggcggaaaggacaatctctttcaaagcttccgactccggcattcaactggaattggggaaacagcctccaaataattattttaagaaaggcggttttctgtccgggatagaggaagagcttaaggacttcaaagaaggggaggcggtgcgttttggttattcctatcagtcaccggatggtaaaaaccataacgcacagggatttatcctgcccgctcgcgacctggttaacaaggatgtagagcttgtttattactcaaaggttccaaagacttctgtgacggaagggcagggaaccgttacaaataatgcaacacttttccacaaccatgatacgggagaaggaatagggccgtgggactggcctccggagaatattgatctggagcatagggttgactataaccataatgccctgaaaaagacggccggcagctacgacgaaacaactcagactatgacatggaaatttgaaatcaaccgttccgccgcagaaatcagcagctttacgatgagagacgcctttgatccactgaaacaggtgattctggacagcaatttcccggacggaaagttagttcttaaaaaagtgaaccgtggtaatccggacggcagagccgatgaggtggaattagcggaaggaagctattcgggcgattactatacactcgaaaagactgagggcggaatctggcttctgaccatacatctggctaagatagaggcgcaggagtattattcttttgaaataaggacgcgcattgttgatccggtgagcctcagccaggatcagggcagggtagagaatactgcagaatatgagctgacctccgattcgaaaattattgaaggcaccgcggcagacagcagattaataccgaacgcatacgtcagtaaaaaagcaatagacagttataattacaaggataatctggtgaaatggcggattggctataaccagaacaatatcctgctgaagaattccgttcttacggaccatctgccggtaggaactgtgttttcaacagatccggccttaaaaagcgggctgaccggcgtctggaaaaagacgcggcaagacagcagcgcggggacatacagggaggtaagctttgaaaaagctgcgtccggttcggagcttcggcgtcccgctgcccctgcaaatctgacggaagcggaagaaattcttcgatataagctggacggcacggatgatacgattcttgccgtatattcggtgacagaaagaacggcgcaggagggggatgctgatcaggacattttctttgtcctgtatgaaaaggctgaggacggattttatgtccctcttatcggggaagatgcctggcagtatgaatttacggcctatgtggaggataagtacaggcaggagaaattcaagactgcagaggggctgaagctgctgaatcaggcggcactggacagcgatattatctccaccagggagaatgaaggaatgccggtgcatatcacaaaagatgcgcaggcgtcgcataccgcagcggtgcatatgctgaaaaagggggagttccatccatttaataaagaagatacgtatgaccgccttccatggcttaaatgggaattagccgtgaatataacgggagtcaattttgaaggagttaaaatttccgatcacatggccggctatctggagcttgaaccggcgagcatgagattttacaggataacaatggctcccgacggcagctatgattatagccctgattcaggtctgactgacacggaaattgatgagaattttacggtggtaaaaaacggcggaggctttacaatcgaatataaggagtctgcgcccctggccagggtaccggttttagtagtttacgacactgttgtagtggattctgttccggacagcggagccgacaatacggtcctgattgattggcccgacggcagcagcgacagcaccgttaccacgaatgcagaggccggccggttccagagcagctcatttgcaaaattggaaaagctgcagatggcgacagtgacaaaaaaaagcgctaattcatcagacagcggcgacggctatactctacagggtgcaaaattccagttaatccctgttttcaagctgcagggcgagtcaccgtccaatcccggagcgtgggtgcagatgaacgatccgacggcggcaaaggtcagaacatcgaatgaaaacgggcagatgtttttcctccgcctgcaaagcaacacgatttataagctggaggagacccaggcagcgccggggtacgatagtctatcttttaagcctcagcatattctgtttgggaaaggggcgcttgacagcctgccaaagcttccggacggtgtggaagatactctgcaatatcaggatacagtctcaaatggggcgaaaatgtattttgacgcattaaattcccctcaggatttggaaagcaaccggttccggttctataagacggataaagacggcaacggtctgaagggcgcggtgttcacgctcacggcgattcaaagcagtattctgactaacagggattcggtgagtgatgagaacggcaaggtggactttgccggactggagcctggcattatttacagtataactgagaaaaagccgccatacggttataaaaaggcggccggttccctcactttggaggcagagtttgacagcgtcacgggagaatttgaaataaatgcgaatgcagtcaatggttttccctatattccgggagacgatgccgccggtacagaagcttcggtgataaatgagcctattttatccaacattgcattttataaaacaggccaggactttgtaccgcttaacgggaatacatatccagtcatatttaaggtcgagagaaaagcggccggagaaccggaggaaagctttgaagactggagtgcagggccggatgggagcagcatgataccgctgacagaggatgggcttgtgaggctcgacagcctgccctgcggcgtttaccggtttacggaggatgtctccgaagtaccggaaaggctccttgcaccggaacaaaagatgcaaaagattctggtggagattaagcctgcctcagatggtttaaacggcagcgtcacattttataattgcagtgacagcagtatggatgagacaatgattaaggctgaaggtgtattaaagaacggctgttttcagcctgccgacacaaaaatccttcaggtaaccaacagcctgcctttcggctatattcaggttaacaaggtaaaagcagtcaggatggacgataagctgactatgacaagcgagccggctgcaggggcagggttcagtgtatacgaggcaaaagccggtacagaagcgatatgggagccggtggataaggatgtgcctcttctcaccctgacaacggacggtgaaggtcatttcagccgggaagagatgggagattccctcatagcaggcaggacgtatctgatcagggaaagcaaagtaccttccggatactgcaaagatacaacgctcaattaccccggatatgaggggccggaaaataaagggtttgttcccgtgacgatcggaagagccggggagacatactatatcggtgcagtcaataagggaacttccgatgcataccgggcagacaaaacttatgattacggagctgccggcctggcatcaggcagcgatgagaagctgctgtactataatatcgaggcacagacaggtaatgttaaaggggagaagcttggagcattttattatgacggcgccgggatcaccagaacgcctctggaaggcgtaacattcgaactcacagagcttccggttacggagtattcctacagggcatccgccgtgacggatcagaacggctccttcctgtttgagaatattccggccggctcagccggagaaggtaaagaatatgaactgagggagattacacccgctttcggctatgagactccggacgacacggacaagtttgtcagaacggtggctgttaaggagtatcagacggcggagatcgacgtgacaggggaaccccttgtgtttttaaatgatccgcttacctttgaaccgaaggtgaataaaaaagatccggagctggcgccgctttccggagcagagttcctgctggaggcggaggcggaggatggaacggtcacggaaatctgttatttaaaagaaacagcgggaggggtacactccattccggatcccggtaaggaatccgatcaaaaatacatgaagcttagcggttcggacatttggaagtattttacatacacaggcgcaaacggcatgggtgcattgaccgccggtacggagacaccaaagctttattacagcggcagctttgaataccggattcgtgaaatcaaggccccggccggatacatggcggacggtgcgctttacaaagtcgaccgctcagcggccgtcaattcggcagacggagtctgttatatttccaactcccaggacgggaagagctttgttaaccggtaccatgaagatatacttttgcttgagaagagaatcgaagcggaggatggcggtatcgttgccggctcttcgggtgcggatgtctccggcttttgtttccttctgaccggaaaggactttaatggaaggccggtggaggaatggttaaaagtggaagatatcaccggagcttcggaggtgaaaatcgttccctccgaaggcatctatctggaaacggaaaaagacggagaaattgttatccgttccatcaaagaagggctctatcaggcaaaggagattgagggaagccggacaggcaaaagcggagcctatattgccgacgccgaaccacagacagtgacggtccgaaggcaggaaggcagggtaaccggcggtaagttcctttttattaattatctgaagcgcgggactataaccggaaaaaaggttgctgccccggtgacggatacttctgcaggtctctcaggcgccctgatggggttatttaaagatggaacagggaacttcacaattgataacacatacctgggaaatacggcgttaagcggcagcggcggtgagttccgttttgaagatattccatacggaacctatattgtggcggagattacacctccctccggctattatctgaaccgtacggtatcctaccgtgtcgtcttatcgggagcttcggagagcgaagggactgagctgattaaaaacagttcggacggcgccgtcaccgccgcagaggatgagagcgagattgtcatcggggactggagggtagagagcgcaggtcatggaggcggcagcaggccggggagcggtggaaacagccgtccgaccgggccgggattagtggagacacagccggaaatacagaaggaaccaggtattttggacgaagaggcggcggagcctccaaaggagatgcctccgtctgtcatttggccggaggattcggagaattttccgcctgcaacaataaaaagggaaccggacggtatcatccgtgttgaaatacctgacgaacggatcacttatgtaacggtgaaaaatgacagagatgaacttgtctttgagggcagttatgacaaaggtttcacgattacttcagagctgcctgcaggagactaccggcttattacaatggatgagaacggggtgccgcttagcagctatctgttcgtaatagacgagggcggcgtgccgctggcgtctctgcccaggatgggagagcattccctgccggtttcggcgctgcccgtgattatggccgcctgcattctgctgattggttatttcaggagaagacgcggatagcccgacagagtttaaaactgcggatagaaacgaaagtccgggcgtgtagtcggcttttgcgtgtttctgctttccaagttccataccagttgctataatagagaggtacaaagatgatgaattatagcagaggtggaagcaagtgatacagatagcagtctgcgatgatgaaaaatattacagggataagatacgggaactggcggctcagtttctggaaaaaaggcagctcccatataccgtcacggtctatccgtcgggggaagactttcttgccggggaggaaaatctcgtaaaatatgatattgtttttctggatatcagcatgaaggacatagacgggatagagacagcaatgcggatccgttcctttcactccggaacctgtattgtgtttgtgaccgcatttctggattatgctctggatgggtataaggccgacgcagtgcgctatctgatgaaggattccctcgggacggagatggaggaatgtatggctgcagttctggaaagaatggagctgcggcaggtggcatttccgtttaccggaggggtacaggaactatacacggataatattctttacgtggagagcaggaaacataaatctgttttcttctgcctggagtcagaacggaaggaataccagctctatgagaagctggatgtgatcgaagagaagcttggtcagtatgcttttctccgcatccataaaagctatctcgtcaatatgaagcatataagaaaaatcagcagttatgcggtaatccttgatacggggagagcctccccgtgccccgccttaaattccgggctgtcagggaggcgtttaccgcttacaaaggagcatggtgatggagatacttatcaggggaaccgtattgtcactgattcttgccatgagctgccgtatattttatgatacgattgccgacggcagggaatggaggcacagtctgacgggagggacagtccttcccgcctttctgctggcttttttctttattgcctttactgaaataccgccgtacctgttccagccggtccggatgattgcggccgttttcatcgtggcgcagatttattaccggatccgtccgcttcagaacctgttactgtcaacgcttttctgcgccctgatctggataattcagatgtttgcttctttgcttatttatattttatacggccgtggagggaaccgtctatgggggatggatgaaatcctgtgctatgggatcctgctgtgcctgatgctgctgtttcagaaagtctataaggggagagacggcattcgcgcgatggccggagaaagctggggcagttttatctgttttcctgttttcagcattattgtgtctgtggctctgagtatgctcaccctggacggaggcagggaggacgggaatatcatgttgattgtgacagccggattctggcttatcaatcttgtggcttttgatatgatggaaaatatcctagcaggacgggcaaaggcggagaaaatgcggctgtcagccgagaggaacaggaaccagatggagatttaccggagcttgctgaaccagaaataccaatcagccagggagcagcagatttcgatgacaatgacgatgaacaatttgtcggagctgtccctgagcgaggaagatattgtgacgctgcttgccaacctgctggacaatgccatcgaggcctgtctgaagcttcatggagacaggagaatacaattgaagatggttctggaagaggaggagcttttcctttcgatccgcaatcccgtggagtgggaggtgaaaatcagcggcaagacagcagcggcggcaaaggagaaatcaggggagcatgggctgggccttggcaatgtggatgccgtgatacgaaaaaacagaggcagaagcacactgcaatgccaggagggctggttttgttttaccgctgtcattttgcagccgcagcgctgaagccgggcaggagccaaagatgcaggcttctgcttttttttgctgtccggccgccgatttgtgccgcctgtattgatgaaacgcgttctgaccaatacaatgggggaagaggaatacaggagctggtcaatcagccacggacaggaggatattatgaaacaaaaagcaaggcattttacggccgcttgtttgataatcagtattgcggtatcggcagcagcctgcggacagagcgggaccgctaaatcagaacaggttacggaggccggcgtatttaccgctgagacgctgtatcctgaaatgattctgacaaaggaggagatgctttccgactatgacgccatgtggaaagccgtgaaggagaactatccctttttcggagtgctttcccgcaacaatccggagcatcctgattattatgacgaagtcatcggggattaccgcagacagattatcaatatgcagcaggaaggcgatgcggcgatgtgggaatttataaccattgtgtccggcagtctctatgatgtgtgcggcctgaccggacacgcaggcatcctgaacccccattatttccgggagcttgatgtcaacgaaaaatacatcagggagtatccggagctccagccctgggttgacgtatccaaccgtacggaggttatatcattttatgattactacgattatctgctgacatttttgaccggagcaggggaggaaatggagggagaagacgaggataaggaggataacggtgttccggcattgggactgcatatggaacggctgggggataagggagatacggcctatgtcagagcagattcttttgacgattcacggatggaggaggaagtgcctgagatacgggctttcctggaggcggcggaagactgcggaaatctgattatagacatacgcggcaacggaggcggaaataccgtttattgggaagaggcatttgtacggccaaatctgacggagccgctaacgtaccggctggtaaggctgatgagggatactgctttagccggacagttttacggctctttctaccagggctcgaacctcagtgcagaggaggttaaaaacgatcccaggtattctgaatttcctgaggaggataaaagagggctggcgctggcaagggaaattgtgacaaccattgaaccggaagacagcggcagcgtgttccggggacggatatggctgcttacgggaccgtccgtatactcatcctccgaggcatttgccgtattctgcagggagaccggctttgccacccttgtgggacagagaaccggcggttccaacagcggggcgcaatcctttatgagcttcccgccagtcaccttctgatccagtttgacgtggagtactgcctgaatggggatggaagctgtaatatggagatgggtacggctcccgatatcgaatcggacgagccgctgcagacagtgcttgacataatagcggacaaacgataatctgaacgctccgcgtacaggtcacagaagcaaaagcggtagagtaaaaatactctatcgctttttatataatggtgatataatcttgattatggttttaccatagctttgtcaagtcaaataaaggatgtgaaagataccgatgaaaaaattaagaggattgttaaggattattttcggccggaccacgtttgttgtattattcctgctggttcagatgggagtgctgctggctggctttaactggctgagggaatatatgatttatgtgtacggcggttcctccctgctgagcgctgtagtgcttatctacattatcagcaatgacgagaacagcagtattaagctgtcgtgggtggtgccgattctggtgattcccgtattcggaacactgttctatctgtttttaaagcttcagccgggcgtaaagctgattaacagaagaatccagtctctggaaaaggggattgccccctatctggtccagaatgaggaagtgctgcgggaatataacaatatcagttccagcgaaggcaatctggcccgatatatgaaccgatacggcgggttcccggtttaccagaacacgaatgtggagtattttcccctgggggatgatatgttcccgaaaatgctggaggagttaagacaggccaagcatttcattttcatggaatattttattgtggaacgcggaattatgtggaatgcaatactggaagtcctcgagcagaaagcaaaagaggggctggaggtccgatttatgtatgacggtatgtgctctctggcgctgcttccctattcctaccctaaaacgcttcaggcaaaggggattaagtgtaaaatgttttctccggtgaaaccggctctttccagctatcagaacaacagggatcatagaaagatatgcgttatcgacggccataccgcatttaccggaggggtgaacctggccgacgaatatatcaacaaaagggagaggttcggtcactggaaggatacggccgtgatgctgaaaggcgatgccgtaaacagctttaccatgatgtttctccagctttggggagtgacggagctggaaaaagaggattacagccgttttcttctcccggcggattacaggtatccggaaggaatggattacagcggttttgttatgccttatgcggacagtcctctggacggagagaatgtgggcgagcaggtatacctcgatatcctcggccatgcaaagcggtatgtgcatatcatgaccccatacctgattttggacgacgtgacgctgactgcacttaaatattcggcaaaacggggagttgagacgattattatcatgcctcatattcccgataaactctatgcctatcttctggcaagatcctattatgcggagctgctgcgcgccggtgtgcagatttatgaatatacgcccggctttgtccatgccaaaatgttcataagcgacgacgaaaaggccgtggttgggacaatcaacctggattacaggagtttgtacctgcatttcgaatgcgccgcctatctctataaaaataataccgtatatacagtggaggaagattttcaggaaacgcttggaaaatgccggttaatcacactggatgactgccggcggtattcaccggtcaaacgttttgcaggaaaagcgctgcgcctgtttgcgccgctgatgtaaaagtgaaaaagtactgaataggccgccggggcggccggactgtgagacagccggctgccccggcggttttttgcaggagcctgtgcgtgctgcgtgccatttcttacttttttcgaaaaacatgattaatatatcgaaaaacgataaaaaaatattgattttcggttttttgcatgttatactgcccataacagcataggtccaggaacatgctgaatttactccggaggtgtatcatatttatgaactggaataatgaaaagtcgatcgggttaacaaaattctttattattttatttgcggcggtttacatactggtgctggtgttctgtccgagaatgacaagggagttcgtggaccacagtttttctgcccgcggtaaagattttaacctatttatggcaaccatctattcgagtgcggttcctctcggcatcattttatggaatctgtacaggatgataggcagaatcggtgaggaacagattttcagcgacgagaatgtaagctgtctgagactgataagctggatgtgttttgcggttgccgtcatctgcctgatttctacggcttattatgtttttttcctgattatagcagcctgcgcggcttttatgggacttctgatacgggttatcaagaatgtattcgtaagggctggggaaatcaaagaagagaatgattatacaatttagagggaaggggctgtcatgggaattattgtcaatctggatgtgatgatggcaaagaggaagatttccgccggagatctggcggagcgcgtcgggatcactccggcgaatttgtcgatactgaagaataataaagcaaaggccatccggttttccacgctggaagcaatctgccgggagctttcctgccagccgggcgacattttggaatttgaggaggagcagctatgatgatggatgaaaatcaaaggacagtggaagagtaccaggtagaagagcaccggacaaaagagataagtgcagaaagccggagggttaaaaggaattatgaaaggcgtgactatcttctcgctctgatcatggccgcagcgtcatttgtctatgtccggggcagtgagtttttttcaggcgcctggctccccctgtttacggcactgttcgtttctgccggagttttttacctccattcccttggacgcaggatggacagagaggggaaaaccagtctgttttttctgattgcgggagctgtctggtttcttgttaaatatctgcctggccggcaggaatgggagcttcaggggataatgccctatgtgactttattcctgcatggagcaggagtctactggctcctgaccgtcagcggggcaagaataaagggagtgttggatgaaagctgtattttggatctgggaaaaggattttttgccctgccgtttatgaactttggtgaagtttttctggcagcggcgcatggggtaaaacaattcagaagcagcgatcaggagacaaagaaaaagcagaaggataaagcaggacagattctgttcggagtcatgatgagtattcccgtactggtgattgtccttcccatgcttgcaggggcggatgagagcttttcggcttttgtgggcggactttcaaatttgtgcagcaccctgacagagaatttttttgaagcgcttttatttggcaatttattgttgaatctgatggtaattctcggtacctgttatttttatggccttttttacggagcttttcatgcaaaatccacaaaagaagacgcagggcaagtaaacgacagccggtctgtcggtctgccctatgcggttatgatgtctttttcatcggcggtctgcggagtttatgtactgttttttctggtgaagttttcagacattcttgcgaaagctttttctcaccagcagagctttgtttacagtgattatgcaagacagggcttttttgaactctgttttatttccgtcattaactttggcctgttctactttatcaaggtattcagcgatagggagaaaaaaacagtaaaacttatgctttccctattgtgtgcggagactctcggatttattatgcttgctttttccaaaatgtgcctttatattagtgtatatggatttacctttaaaagggtatttaccagttggtttatggcagtgctgttcatcacgtttttcaggctgatctattgcatctggaaacagggcaatgccataaaaacagcagtattatttgcctctgccacatttcttctgctggcatacagcaatatggagggatggatgcgccaggcaaacctgatgatgggctttttgcagcagtagcatggctttgcgggggcctgtccgggaagaaaggagatacgattcaaaattgacagaaggagcacttgtactggaaggcggctccctgcgcagcgtatttacggcaggcgtgctggatacactgctggagcatgaaatcaggctttcctatgtaaacggagtttccgccggtacgatggcgggaatgaattacatcagcggacagaaggggcgcatgctccgcattaataaagaatatctgcatgacaggcggtatatgggactgaggagcctggtgaaaagcaggctgatattcaatttcgactttgtattcggagaattgagcaatgaactgattccctttgattatgacgccttttacggttcccctcagaaatttgaggtggtagccacgagatgcaggacgggaaggccggaattttttgacaaatcctcctgcacggagatgatgcaggcagtcagggcctccagcagcattccgatgctttcacggatggtgaaagttaaccataaaaattatctggacggaggcgtttctctgccaattgcttatgagagagcttttgaactcgggtatggaaaagtggtggtagttctgacacgccatagaggttacagaaagaagccggtcggctccatgacggagagggcctatgagcgctattttgcgccgctccctcatctgcgggaagcgctttatgaagttcccggacgctataacagaatgcaggaagaaatagacaggctggaggaggaaggacgtatctttgtaatccgtcccgagtatccggtggacgtgtcacggttcgagcaggatgtcagaaagctggagaagctctaccgggaaggagtcagaatcatggaaggacggctggaagcattggaggcgtatttagaacaggaacaaaagtaaaatatcgtgttaaattttcaaggaaatccgatcatggattcatctataagggctagatctctcgaacagggaggtttggcccttttattgattgcgttgacctgtgcgcggagcgtgcagttatcattgaagatggtgaccatgaaatctaccatattttcacagtttgaacacaaaatgcacacaatttattgatatagtttcaacaaataaacaaataagatgaatatacggttaaatgaaaggcggtaggaaaattatatgaacagacagcgcacagcggttaccatggcagccataatggcattttcagcggcggctccgatgacggcggaggcatcttccagctacagtatgagaaagaaagtaattactgcagccggcattatgacggctgagtcagacgacagcaggcttgtgacgagggcccagtttgccgaaatgctggtaaaggcatccacctaccgcagcagtgtcagctctgaaaataacgtttccattttctccgatgtggacagaaacagtgaatatgcatcttacataagagtagcagttgagcaaggctggatgacgggatatctgggcgggaaattcaaaccggatgaaaatattacgatgcaggaggcggtaaaagcagttctggcccttcttggatatacaaatgaagattttggaagcaaccaggcggcaaacaggctggctaaggcatcctatctggaactggacgaggagattgggaaaaccggagctgaagtcctcagccgctttgattgtgtgaatctcttttataaccttatgaagaccaatacaaaggagaatgaaggaaaggcagaaacaagttccacggtctatgcggccgtactcgacttcacacttacctcggatggggaaatcaatccgctggaagcgctggaaagcaagctgaaggggccgatagcggttaaagacaggagcttgaaaagtatcctgccattctccctatccaaagcatccttttatctggacggtgagtcggcttccgcggatgagctggaggacggggcggtcgtgatttattataatacaacttcgagggctgtttacggctattcggagagcggcaacggagggcgcggagcgacaaaaggcacgctcgatgcaatctactataaatcttctgatgtcatgataccgacttcgattgttgtggatggagtggaatatgaactggccacctccgatatgcagttcgctttctctgtttacggtgatttaaaggtcggcgatgagattattgttatctgggaaaacaagacggcctccgccgtggatgatgataacgacaatccggagtataagctgattgattatattgaataggcggggagaatagaaatatgatagaaaaagttaaaggtctgtttaaaaggctgcgtcaggcaagggggccaaaaaagccgcgcaaaatgagcagaaagaagaagctgcttaccgcagcagcaggactcattttgttcctggcgcttattactgcggcagtccggcagaataaagcaagcgccgtgaaggcccagagtcagagggtgaacacagccaccgttataagacagaatattacatcaaccctttcctcctccggtacaatctcaccgaaggatacgtacagcattacctctatgtcggaaggggaggtggtgcaggcagactttgaggagggtgacagggtggaagcgggacaaatcttataccggattgacgcttcctccatggaatcaaagctcagttccgccagcaacagcctggaacgcgctcagagcagctatgatacggcggtaagcgattataatgaggcggttgggaaatacagcggaaatacttataaagcgacgaaatcaggctatatcaaacagctctacattgaggccggtgataaggttgcctccaatacccagattgccgatatttacaatgatcagattatgaaaatcaaattgccgtttttaaatatggaggcggcggccattgctcccggcagtccggcagtccttaccttaagcgacacgctggaacagctggatggcacggtcctgagcgtaagctcgatggatgaggccctgacaggcggccgcctggtccgctacgttacgattcaggtggcgaacccgggaggtctcacggccgatatgacggccacagccgcggttggcgattttgtatccagcggagacggaactttttccgcgacagtggataccgtgctggctgccgacctttcctccaatgtggaggtagaagccctgcttgtcaatgaaggtgattttgtcagcgtgggaagcccgattttcagtatgaaggccagcactgccgagaaactgattaaaacttataaggactccatggataatgcccaggccagcctggagcaggcgcagtcaagtctggattcaacacaggatacatatgatgactatacgattacggctccgatatccggcaccgtgattaagaaaagctataaagtaggagacaaggtacagaacggttcaagcgcttcggccctggccgttatttacgacatgtcctccgttaccttccagatgaatatcgatgaacttgatatcagtaatgtaaagacgggacagaccgtagaggtgacggcggatgcttttgaaaacgagaagttcagcggaaaggttaccaatatcagcctggaaggcaccagctccaatggagtcacttattatccggtgactgtaaccctcgatgaggtgggaggacttctacccggcatgaatgtggacggcgttattatagtggattccgttgaaaatgcgctggcggttccggccgatgccctccagaggggaaatctggtttacgtgaaggatgattctgtaacagaggcacaggggcgtgtcccggcaggattccgggaagtgaaggtcgggaccggacttatcagttcagattatgtggaaattgtatcgggagatttacaggaaggcgatgtggtatacgtggcaaaatcaagcgttaattccgacagcggcgcgatgatgatgatgccggtgggaatggatatgccctccggtggcggaggctacggagacggcggtggaagccgtggaagcggaaacggcagccgccccggcccgtgacagagaggtggaagtatggatgaaaacaggcctttgattgaactgaaagacatttataagatatatcagatgggttcggaggaggtgcgcgccaacgacggcatcagcctgagcattgaaaagggtgaatttgttgccattgtaggtaaatccggcagcggtaaatcaacgcttatgaatatcatcggtgcccttgatgtaccgacagagggcgaatattatctgggggagaggatgtcagccatatgagcgacaatcagctggcagaaatcagaaataagatgatcggttttatttttcagcagtataaccttctgcccagggataatctgcttgaaaatgtagaacttccccttctctatgcgggtgttccgaatcctgaacggaaggaacgggctttaagatccctcgagaaagtaggcctggctgataaatgggccagcaggccgaaacagctttccggcggacagcagcagagagtttccattgcccgggctctggcaggcagcccgtccctgattctggctgatgaaccgaccggagcgctggattcgagaacaagccgggatgtcctggattttatgaaagaactgaaccgggaaggcaatacgatagtcatgattacccatgatagttccatagcgatggaagcgaggcgtgttgtccggatacatgacggtaaaatcaattttgacggggatgtggaagagtatgcggcagtcatttagattagctttaaaaagtatatggagcaataagatgcgctccttcctgaccatgctgggaatcatcataggtgttgccgccgtcatcattctggtagggctggtcaacggccagatgtcatatatgactgagagtttttccggcatgggaaccaatcagataacggtaaacctggtaaatctgagcactagatcggtatcggcagatcagatgtatgaattttatgaggataacgaacaatacttcggacagatgtcgcccagcgtaagcgtaaacggaacggtgaaatcaggcaatgaatccctgaccagcacctccatcacaggcgtcagcgaggaatatctggatttgaagagccaggagctgcaggcaggccgttttatccagtattcagatatcctgtccagacagaaggtctgcgtaatcggttattatctggcgaatgagctttacgggggagcatccaaagcgcttggacagacgctcaaggtcaatggccaggcctacgagattgtaggctgtgtggagcgccagaccagcgaaagcgataacgtggatgagggaggcagcgacgattttatttacatcccctatacggcggcgatgaagctttcaaggaacggaacaattaacaattacatatttaccacgaaggataccggcaatacggaaacggtaaaagcgctttttgatgcgtttctgttccctatatttaaaaacgaagatctctatacggttacggccatgagcgaacttctggattccctgaattccatgatagcaatgatgtccatggtacttggagggatagccggaatctcccttctggtggccggagtcggcgttatgaatattatgcttgtatccgtaacggagcgtacacgggagattggaatcagaaaatctctgggggcgaaaaaaagaacgatcatgcagcaatttgtcatagaggctgccgtcacaagctcgatcggaggtgttattggaatcatcctgggctgtgttctgaccggagccatcggaaccctgatgggaatgaccgccgttccaacggccggctccatcctgctctccttcagcttctccgtaggaatcggacttctgtttggctatatgccggcaagccgcgccgcacggctgaatcctatcgatgcgctgcgcagtgaataatgtctcaggcagcgggatactgttcacagccctgccaaaaacagttctgcgaccggctgtgaacagtaacgaaagcgtacccgcccttgcggcttcagcgaaatctttattgatattgtctccggaccgtgctaaaatcagcctataagaagctaaaatcaggaggaaacgtgccatgaaatttattgacatgcactgtgatacaatctcgtctatttatcttgacagaatgggcggagaagtgaaaaagttaagggagaataacggccatgtggatctggccaggctgaaaaagggcggctgccttgcgcagaatttcgccctttttactatactgaaaaaagatccggatccctgcggttttgcgagaggcgcctgcagactgttcaaggaggaactggcggaaaatgacgatatgatacgccaggccgtcacagttgaggagattctccggaatgaccgcgacggaagaatgtcaggcgtgcttacgatcgaagagggcggaatctgcaacggcagtacggacgtgcttcgggatttttaccgcgaaggcgtcagaatgatgactttgacctggaattatgaaaatgatctggcctatccaaataaggtggatatgaacacgggaatatcgatgccggagacggagcatggacttaagaaaaagggaatcgaatttgttgagctgatggaggaaatcggaatggcggtggatgtgtcgcatctcggggatgccggattctgggacgtggctgagattatgaagaagccgtttgcggccagccattcgaatgccagggcaatagcagggcataccaggaacctgacggatgagatgatccgtaccatggcggagcgcggaggggtgatgggaattaattactgccccgtatttctggatgacagggaagacggcggcacgagccgcatcagcgctatggtgcgccatattaaacatatcagaaatgtgggcgggatcgaatgcattggactgggttcggatttcgacggtatttcgggcacactcgagatagattccccgtcagctgtccatctgctggaggaagcgctttaccggaacggctttacacagaccgaggtggaaaaaattttctaccgtaatgtcctgcgtttttacggcgatgtatggaaaaagtaaaatgaaacgtaaaatatgttccggtctttgagggaaaattaaagagaaagtaaaaattttacattcattttacattcccatggtgatgactttacatagatttgatatagtgatgacatactaaaaagataaaagaagataggatgggagaattaacagtatgtcaatcacagatttgggaatgatttttcagtttatcgggggactgggaatgttcctttacggtatgggggcaatggccgacggccttcagaaatttgcaggcaaccggctccagaagctgcttggaatcctgacaaccaaccgggtcctcggcgttctggtgggagcgggcgtcacggctattattcagagcagttccgcaactaccgtcatggtagtcggctttgtcaatgccggaattattaatctgctgcaggcaaccggcatcatcatgggagccaatatcggtacgacggtgacaagctggatcgtatcgatgagcgaatggggcgaagtgctgaagccggaattctttgcccccgttctgttcggggcaggcgcctttatcacactgtttgcaaagagccataagaaaaaggaaggcgctgaaattctgatcggttttgccctgcttttcatcgggctttcctttatgtcaggcgcgattaagccataccgggatgcgccgattttctcagaagcgttccgtgttcttgggcagaatccgattctcggcattttaacaggacttgtagttacggctgtgattcagagcagctcggcatcggtgggaattcttcagactcttgccatcaacggaatggtaaactggcagtcggctatctttatcaccctcggccagaatatcggaacctgtgtgacggctcttttatcctgtatcggaacctcccgtacggcaaagagagcagcggtgattcatcttcttttcaacgtattcggcacggtgattttcggctttgccatgttctttatatttattgccaatccggcctttgcttcatccacggcggacagtgttggaatatccgtattccatacaattttcaatatcactaatacggtactcctgttcccgtttgccggactgcttgtgaaagcgtccgatatcctggtgagaaaaggaacagaaaaaccggtatccacggtggaagcagatatggtgcgccatctggacgacagaattctggagacaccgtcatttgccatcgagaacgccggccacgaaatcatcaacatggctaaaatctcacttgcaaacgtaaaaattgcaacggcagctcttctggaagagaatgaagcgttctgcagagaagtctttgaaaatgaagaaaccattgaccgcatggagaaaattcttacggaatatctgcttaaaattaataacctttccttgaatgacgagcagcatttactggtcaagaatatgtattacacgattggcaacctggaacgaatcggggatcactcggaaaacctggccgaactggcaaggaagcggatggatacccactgttcctttacagactcggggttaaaggaattaaaagaaatctcggatgcggctattcaggcggtagaatgttccatcgatgcaagagcggaaaaagaaatgatgaaaatcaggcaaaccgccaggtgggaggaaacagtggataaccttgaagaagaactcagggaaagccatatggaccggctttccaatagtgaatgcactgtcgaaagcggggttattttcctcgatgccatagccaattatgaacgaatcgccgaccacgcaaagaacgtcgcaggatatgtaaaggaagagatgcaatgaaacatttaatttatgtgatagaagatgatgagaatatcaggaacctgatctgtgtggcgctggaaaatttcggacaccgctcggagggctttgagacggcggaggaagcgctggagcgcctcggcagtatcatgaaacgcggaaaagaagcctacagggagcttccgtccatgtttatctttgactggatgcttcccggcatggacgggatgactgcaatcggaaaggtcagggaattggagccgctcaaaggcacgccggttctgatgctgactgcaaaggatcgggaaaccgatatcgtaatgggacttgataacggggcggacgattatatgacaaagccgttcgggattctggaactttcggcccgggtcagaaatctgctgaagcgatccggcacggtcagggaggaaagcacctgtctggcggccggtgatgtgaaaatcgacaaggagacaagggaagtggtctcctgcggtgaaaaggttgaactcaccctgaaggaatttgagcttttaagctatctgatggagcatatgaaccgggtggtgacaagggatgaacttctggacaatatctggggctatgattatgacggcgagaccaggacactcgatatgcatatcaagacactcaggcagaagcttaaggatgcgggacagcagataaagacagtccgcggagtgggataccgtttcctgaaagaaaaggaacgataacctgcacgctccgcgatgcacagaaacggtaaaaataccgttttacggctgtgaatagtagccataaaatcacagtaaattaccgggctccacagttaataaagatacggggagggacagatttatgcggaaagccatattaaaaaaatttattcagctgctgtttctggctcttgccctgaatacgtttatcttttatgtggtcacaagcagtatgctgctcaaaaaaacacgctccaatatgatgtttgctttggagacggcggacagcctctttgattattccgacgatttgcaggaacaggcagggatgctgaaaaaagtagccgatatgaaccagagccgttttacgattgttaaaaaagacggcacggtcgaggtggatacagaggtaagcaatgcggcagccatggagaaccatatggagcgtgaggaggtaaaggaagctctccagtatggaagcggacactctatccggaagtcggagacccttggaatccagatgctctatgtggccagaatgtcgtcgaacggcgaatacatattccggctggcatccccatattcgggaatgcaggaatatctgatcatgctgctgccggccgtgctgctgagcttcgccattgcattttttgcctcctccatggaagcggagcgattttcacaatccatcaccagacccctacaggatatctcgagggagatgatgaaagtggacggggattatgcggatctgcattttgaccggtgtccttaccaggaaatcaatgtaatcgccgatacgacgacaaaaatgtcccgcaatgtcaaagaatatctggaacgtctggaacaggagaagcagatacgccaggaatttttcagcaatgcctcccatgaattgaaaactccgattacatccatccggggatatgtggagctgctggaaagcggtatggctctgaatgaggagacaacccatgatttcctgaagagaattaagaaggaagccatgagaatgacaagccttgtggatgacattctgatgatctccaggctggaatcaaggggagccaaaacggaaatcgttacaatccaggtggcggatctgctggaggagacggtttcctccctggctacccaggcggcggaacgtggcgttgtgattcataagcagtttgagtcctttgccatcagggccgatttgagacagatgaatgagctgtgcatgaacctgatcggcaatgcggtaaaatacaacaatacggacggggaaatatgggtagaggcgcgcagggaaaacacagactttgtcctggctgtaagggacagcggtgttgggataccgcaggaaagcctgaaccgcatctttgaacgtttctaccgggtggataaaggacgcagccgaaaacagggcggtacgggattgggactggctattgtcaagcatgtcgtaaactattaccacggaacggtacgggtggaatctgaaatcggaaaaggaagtacgtttaccgtccgtctgccggttgcggtgcagccgtaacagtaatttatttaacaggaaaattctcctgttaaataaaaaacgctccgcggaggagcgcgcccgcgggattcgttcttgtaccttcgaaacgggtattttaacctgcttcgaaggtattttttagtcttttgcactttaatacgttgattttttaggaatttaaacaaatgaaattgactccgggcaaaaagtgtagtatgatatgttttaattccagtctggatatgaatttgaaacaatcaggaggagagattatgaaaaaaactaaaaaaattatggcccttgttatggcaggacttatggcagcatccatgacagcctgccaaacgaagacagaaccgcagccgaccggcggacaggagagtgaatcagcgtcagcagaggccccggctggcacagaagcaccggcagctgcaggaaaaacttataaaatcggtattatccagctgacacagcatgccgctcttgacaagacgaatgaaggctttgtggcagccctcaaggatgccggattagactgtgagattgatcagcagaatgcttccggcgaccagtcggcatgccagacgattgccgagacacttgtaaataacggaaatgacctgatttttgcaattgcaacaccggcggcacaggccgtggcaggtgttaccgagacaatcccgattctctgcagcgcggttacggatccggcggcttccggtcttgtggagagcaatgaaaagccaaactgtaatgtatcgggcacatccgacctgacaccggttaaagagcagattgatttaatgcagaagattatgcctgatgttaagagcgtaggccttctctattgttcggcagagtccaactccgtacttcagattgatatggcaaaggaagctcttgaaacggcaggaattgcttataaggattatacggtttcatcctccaacgagattcagactgtagtggaatccatggtcggaaacgtagactgtatctatgcgccgacggataacatgattgcagccggcatgacgacagtggctatggttgccaatgaaaacaagattccggttatctgcggtgaagagggtatggtagacgccggcggacttgctacatacggtattgactattaccagttaggatatatggcaggcgaacaggctgtggatatccttacaaaaggagcagatattaaggaaatgccaatcggctacctggatgcttccaaatgcgctctgaagataaatgaggagacggctgccgaactcggtatcgacgtatcaaacattaagtaattatcagacttgactttttcaggggacggcttatcataatcaataagcggtcccctgaaagcggaatatacgttacagttctgtctccggccaaactgcaacaaatgatgcgcagaaacggcaaaaaacgccgaaaaaacagcgaaaataccccgcggaatacatttaggctgaacggttacgagtatacggtatctgagccggaaaaaggaatttagaaaagatatatcggaggaaacagtagatgaatggtttgttagcttctcttcagggcgccgtggcacagggcgtactttgggggatcatggttttaggtgtttatattacgtaccgtctgatggacattgctgatttgaccgtagacggaagttttgcgctgggcgcttgcgtctgcgctgtgctggttgtgaataaacaggtggatcctgttgtcgcactgctggtgtcagccatggcaggtctggcagccggagccgtgacaggcattctgcacactgtttttgaaattccggctattctggcgggaattctgacccagatttccctgtggtccatcaatctgagactgatgggcgggaagagcaacattccccttctcaaggtggagaccttaatcagcaaatttgtgaaaatgacagggctgacccagtcacaggcatccatgataatcggtattatcgccgctattattattattgccttcctttactggttttttggaacagagatcggaagcgcgatgcgtgcgaccggcaataacgaagatatggtccgtgccctgggagttaacacaaagatgacaaaactgctggcactgacactgagcaacggtcttgtgggactttccggcgcacttgtctgtcagagccagaaatatggtgatatcaacctgggaacaggcgctatcgtaatcggtctggcatccatcgtaatcggcgaggtcctgatgggacggcttacctcgttctactggaagctgacatcagtcgtagtcggttccgtaacctactttgtgatccgcgcactcgtactcagaatgggtctggatgccaatgacatgaagcttctctcggctattattgtggcgctggccctcagcttccccgttgtactgtcgaaatacaggctgagaaaagaatatacggagggaggcgacgaggaatgttaacaattaccaatgtaagaaaaacttttaataagggaacaattaatgaaaaaaaggcattgaacggcattaaccttcatctggaatccggtgattttgttacaattatcggaggaaacggcgccggtaaatctacaatgctgaacatgatcgcaggagtatacccgattgacagcggtaagattgtgatagacggaattaatatttcaagggaaccggaacacagacgtgcgaaatacatcggaagggttttccaggatccgatgagggggacggcggccaatatggaaattcaggaaaacctggctatggctctcaggagagggaaaatcaggggacttggctggggaatcaggaataatgagaaggattattacaggactgcgcttgcacaactggatctgggccttcagacgcgcatgacgagtaaggtcggactgctgtccggaggacagaggcaggcgcttacactattaatggcaacccttcaaaagccaaagcttcttcttctggatgaacatacggcggctctggatccgaagacggccagaaaggtgcttgagctgacggaaaagattgtcaacgagcaggaacttaccgctctcatggtcacacataacatgaaagatgccatccagatcggcaaccgtctgattatgatgcatgaaggacggattatttatgatgtgtcgggggaggataaaaagaagctgcaggtggaagacctgctggagaaatttgagacggccagcggtgaagagtttgcaaatgacaggatgatgctggcgaaatagcctttgctgcccgcagaaatcagaggatattaatccccagatttctgcgggcttctttcttacaatagacggaataagacgcccgatgtggaatatatggacaaaaattcacattttgttaatatttgtaaaagaaaatttacatttacagggagtcaactttattggcaattctttatatttatgataaaatataatgtacgcgttctgataagaaataatttatgtaagaaaaaacgataacctgcacgctctgcgttcaggtcaccgccatcaatgatgaaagacacttatattacgaagtgtcttttgcgtaacagttcatactatttgaactgttactcttttactgccagtcaataaaaatacattggagagattgctgcatgttcaaactaaaaaaagacgattatctggcttccctgaaccgggccagaagaaagagaaaccggggagattataaaaagtacgctctgatagctgccggagctgtagtgataatcggcgccgtcgtgtttgccggccttaagctgggaaacagagagacaggaggaaaaccgggcgagtctgccgaatcggtatatgagactgcggtgaatcccgaagaggaatcaaaagccacggaagcggcagaaaaaaaagcggtagtggattcctattcgaatctgggaattgtccaggtaaccgggtatctgaatatgcgtgagagtgccagcaccgatgccgacgttatcgggaagctgcagggtgacagcgcctgcgagattcttgacgattccacggaaggctggtatcagataagctccggcgggctgaccggttacatcagttcagaattcgtcctgaccggcgaagaagcaaaggccaaggcggaggaactggttgccctgcgggccattataacagtggatgccctgaatatcagaaaggagccgaccacggaatcggatgctgtgggacaggcccttaaaaatgaacggtatgtgattgaagaagacaccggtgacggatggctgaaaatccccagcggatatatagcctccgaatttgtggaacagaaatatgcgctgaatgaagccaggaaactggatatgaagtcgatggttttaaatctttataagaatatcggtatttccagcgttgacaattacctgaatgtcagagaagagcccagtgaggatgggaaaattatcggtaagatgacaagtaagtctgccggtgacattcttgagacgacggaagacgggcagtggtacaagatacattccggcccggtaaccggctatgttaaggcggagtacattctgaccggtgcttcggcaaagaatgaggcgctcaatgtggcggagctgatggccattgtttcaacggaccgtttgaatgtaagaaccgaaccttcgaccgaatcccagatatggactcagatttccaataatgagagatatgcggttctgagccagaccgacggctgggtagagattgagctggacagcacgtcggcctatgtatcaaccgattttgtggatgtccggtatgcccttcctgaggcgattaaattctcgccgctggatgcaaatgtttctctcagaaataaaattgtcaactatgcccttcagtttgtgggaggaaaatatgtatggggcggcaatgaccctcatacaggagccgactgctccggctttacgaaatatgtatacagcaaggtggccgggataacactgaaccgtgtatcaagggatcaggcaaaacagggcaaacagattaagtcctctgaaatgcgtccgggcgatttaatcttctatacaaacagtaagggaacgatcaatcatgtcgcgatgtatatcggaaacggccagattgtccatgcggcaagccggcgaagcggcatcaagatttctacatggaattaccgtaatccttatcgtattattaatctgcttggtgattagatgaggatttaactgaggttaggaggacgcggccggaaccgactatgtccggtgtggtgaggggggagctggctgagtcttccgtccccggttggagggttaaaaataaaaatctttttaaaggttatagacttatagcctgtgatggttctgatataaatatcgcgcataatccggatgataaagaatcttattttacaaacggaaatgcccggggatttaaccagttgcatcttaacgcaatatatgatttattagataagatttacacggatatcattatacaaccgggtaagattgaaaataaacacaaagctttttgcgatatggtagaccgatataccggaatacgaaacacgctctttcttgttgatagaggctacgagtcatataacaatcctgcacatgtacaagaaaaaggtgctttttatttgtttagatgtaaagatatcaatagcagcggaatattgtcacagcccacgttactataaccaaatgtacgaacaggcacgtgtatcaaatcaataatacatttgccatacacatatgcaaatattttataagtaaaatggcggagaaatctccgccagatgtagaagcattgataagtaaagaaattttacctgttcgtcctggacgtcacgaccctcgcaaagtcgatcacaagaaagcagttagttttctatacagagtagcttaacatcaaatatattatacaactttttgaagcagatgaaaacatctatttcaatgtgttgctctaaaaaatccatagtgccggaaaaaagaatcaccctatccttgtttttaataaaaacagaaatagggtgataattatgtcttgttatcttaatgacattgcccggccgctgattgtctcgcgcgttaagtgcgggggcggaccttgtcgagaccactcagcgctactaccatgtacgggaaatactatatgccatcaatgggcttataaaaaaataacggaagatattgatatcggcctgccggaaacacgttgtggccgcgacaaggcaaggctctccctatttaaggttagagacaatcagcgcccggaacggaccatgtccggtgtcgcgaaaacttccgcctgagtcttccgtccctgcgaaaccttgaccgggggaaggaggcggaatcaattctggaggggatatggaagcccatccgtgcttaatgaggtttctcacgaatttagcacggctatgcgcttcgaaaagtgcaaacggtccccgtaagaattcattccgcctccttccccctcacgacaccctccaaccggggacggaagactcagccagccccctcaccacaccggacatggtccgttccggacgcgtcctcctaacctcagttaaatccccttttataaattgtaagttttttatagtcgcattttctgacaaaatatgatataattctttctgaatcgtatgttttgtaacaaaaacgtaataatttcaaaggtttggagagagatgaatggcagagcagaaatcagatgattataaaagcaggctaaataaggcccgtaataagcgtaatggaaaagatccgatgaaatattttatgtatgctgcaggcggtatcattgttattcttctggttgttgtggctgtgaagctggccaggggaggtactttcgcaggctcacccaaggcgagaatggtgaatgagacagatacaggagaagccgctgaccaggatgcctcaggggaatcagagagtgtggattcggagaatgcggagcctacgatgtcacccgaggaactggcccaggcggagacggatgcccaaaagaaaagcgtcgtggaatcgtataataatctgggactcgttcaggtttccggatatctgaatatgcgtgagagcgccagcaaggatgcaaaggtaatcggcaagctgctgggaggaagcgcctgcgagattttagatgattcgacggaaggctggtatcagataagctccggcggattgaacggttatatcagttccgagtttgttctgaccggggaagccgccaaggaggaggcgtttgaacaggtgaaagaaatggccgtgatcacagccgacaagctgaatgtccgcagtgaaccgactccggacggccagattgtggagcagatcctgaagaatgagaggtactctattctcggccagcaggatggatggatccagatcagcgacggttatatttcttccgattatgtagatatccgctatgcactcaatgaggcgagaaagctggatttgagaaccatggtattgaacctttatgacaacctcggtatatctaatgtaaacaactacctgaatatcagggaagaaccgaaggaagacggcaaaattatcggtaagatgacgagtaaatcggccggagaaattcttgaaaagacagaagacggagagtggtataagattaaatcaggccctgttaccggttatgtcaaatccgagtttatcctgacaggcgacgcagcaaagcaggaggctcttaatgtggctgaactgatggcaattgtctccacagaccgcctgaatgcaaggacggagccgagtacggaatcaccgatatggacccagatttcaaatagtgagcgttatgccgtcttaaagcagatggacggctgggtagagattgagcttgactccaccagcgcctatgtggcaactgattttgtagacgtgcgttatgcgctgaatgaagcgatcaagttcagccccatcgtagaaactgcttcttcctccggcggaaacaagggcagcagcgggaacaaaggcggaagcggcggcaataagggcggagtgggtaatacgccgggtaatgcagccggttcctcaaagagaacccagattgcaaattatgcgacccagttccttggcaatccatatgtgtggggtggtacaagccttacgcggggagccgactgttccggattcacgatggctgttatggctaattttggtgtcagcttaccgcatcattccggttcccaggcgaactgtggcaagtcgatcaattcctcacagatgagaccgggcgatttagtattttacgcaaacagcagcggaactatcaaccacgtggccctctatatcggcaacggccaggtatgccacgcatccaacgcaagggacggcatcaagatttcaacctggaattaccgtacgcctaagaagattgtcaatgtgttaggtgattaaaatagccgaatgccagagcgtgtttgaaaattgctttctgtcagctgtgcgtcacactttgtgggagatttggaccgaatgagcgcggcgtagtgggctggaacagtttatgctgtctggactgtgacagcatgaaataagtatagaagaggtatcgtatctgagacataatctgtccagatgcgatacctcttttttgccgcggcgttgaacagccggtatctgtattttatctggctctttgtcaatagttggggtgggatttgttaaaatcccgccccaattctatgaaaaaggccctttttatgtttagttccaggttttactgattttgggcatgccaaataagcctccgcattaccgacctttttatcctatgatgtacagtgaagtatccgggttcggaaccgtttgaaattccggattccgtagctgctccgttttaatacctttatcttgttgttaaatccttctgtgggaccatttgtcagcccgtatttaaaggcattcaggatttcttttcgccaggccctgtaggtcttagcacaggcctcaaattccttgatcccacagctctgcgcattcgcaatccagtcatcaaattccctctgctgctgacgatacgcttccatctggcagatatcatagaaccactctttcatgcggtgtgccagacgcagatcctcgctatagtgaagcattaaatcacaggcctgtttgttctcatccttcagctttttgtagcgggtcagaatgagtttccggctgcgtttataatacttacgcagagaaaccggcatggagcgctgcagccgtttgcgtacattttcaatcgcccatgtcacctgccggatgaaatgatatttatccacgatgattgtagcatttggaaagaaggtttgtgcaagttcggtgtaggggcgccacatatcgcagacgaagaactttaccttcaggcgttctttcctgggaatgttccgccaataatcagccagatggctctgggtccgatctgggagaatgtcgaggatccgacgctttttcggatcaaccagaatgcactgatatttaccggtagaagcattgcctttgaattcgtcaatggaaagcgcttgtggaagctggtcaggcggaggatagcaaatcgtgtccagaaggcggcagaccgtctggacggaaacaccggtaagctctgcgatctgttttaaggaaaaggtctgccggagcagggagacaatgtaaaatgccagcctgcgggtcctgcggtggtagctggggaggaacgaatagggttccgtgaaccgtttgcggcagtatgggcagaggtagcggcgtttgcgaagaagcaggattacttgttttcccagtaagggaatgtcctggacttcttgtaaacggtaatcatgaatccgttttgttttagccccacagcagggacaagtctgttctaccggttgggactggatgaaaattttaatgaaagagtctgcctgaaccacttttttaatagaaacaccttccaagttaaggaaagccttggtataattagggtacatctataaggggtcacctccataacattaaactttggtcgggataatgcgtttaggaggcttcttatagatgtattttattacaacgaaaagaatgttggaagtgtgcttttcagcacaccccaacattcagtatagaaccttttatctttccgtcagtaatggttcgctgaagatttccttcattgcctcgataaaaacatggtctgccctggataaaaaagagccggctgatgttccgacagagagatcccaatacgctttatataccgggggaatggaaaaacaggaaaatgccgcatctaccatagtcagtttcgaatactgactggggatgagcgttactccggcgccggaagcagccagaagctgggctgttgcaaaattcttcacggtcaggcggatgacgggctgggttatcccggcacgttttaagatggaatcactcacctggcggatccgctgggaggagggcagcatgataagcggctctttggcgaggtgcctgacgtccaaaacggggtatattgaaccattgtcagacacggcctgttctgccagagcgcacaggtgggaatcctttcccgctacgatcagaaaataatccctggaaagaaaatgatattccagctggggattggcggattccttgggggcgtgcgttataataaaatcaaccttgccggctgtcagaagagcttccagccgatcggaggtctcttccgtaacagttatctcgatggaaggatattgctccataaaccgggggaggattccgggcaggacgacagttcccaggtggcttgtgatgccgatatgaatgcgtcctgttttcatattattgatatcgctgatctccagttcgaaattctcgtacattttcagaatctgaagagccatatgataatatttttcaccggcatacgtcagggtaagcccggtagaggcccggttaaacagaggggttcccagactgtcttcaatccgtttaatatactggctgagggacggctgggcgataaaaagctttttggcggcctgggatatgcttttctcatctgctactgttttgatataaatcaattcccgctgggtcatctgagtctcctttccataataaagcggcgctttctgtgagatgaattatagatgaatttatagtataggataaataatatatactatataatttatataatatttgtgctatgattaaaaacattatataataaaacaagataaaaagaaagtacaaatcgatcttatcacattcgggaggtatcacatggtaaaactgtatgagggcggggtatatcttttaaacggcgaggaattgattgaagaaaaagaaagcgccagagtggaacagataacaggcagaaaaatttccatagaagaagccagaaagaacacgattgcctattcaattctgaaagcgcataacacatcagactctatggaaaatcttaaagtacgttttgacagtatggcatcccatgacattacatttgtcggaattattcagacggcaattgcatcgggaatggaacgttttcccctgccttacgtgcttacaaactgccacaattccctgtgtgccgtaggcggtacaatcaatgaagatgatcacatatttggtctgtctgcggcaaagaaatacggcggtatctacgtgcctccgcacattgccgtaattcaccagtatatgagagagatgatggccggctgcgggaaaatgattctcggttccgacagccacaccagatatggcgctctcggtacgatggcaatcggagagggcggcggtgaacttgtaaaacagcttctttgcgacacatatgacgttgcctgtcccgaagtggtcgcagtgtatctcgacggaaagccgtccccgtttgtagggccgcaggatattgccctggccattataggagctgtatttaaaaacggatatgttaaaaataaggtaatggagtttgtgggaccgggcgtttccgagatggatacggactacagaaatggaatcgatgtaatgaccaccgagactacttgtctttcctctgtctggagaacggatgaagatacaaggaagttcctgaagctccatggcagggaagacgattataaagaactgaatccgggcgggacggcgtattacgacggagccatctatgtggatctgagtacggtaaagccgatgatcgcgcttccattccatccgagcaatacatatgagattgatgagctgaatcacaatctggccgacattctttcagaggtagagaaggaggccgacaggatagcggggcgcgaaggttccctgagactggttgataaaattgttaacggcaggctccaggtgcagcagggcgtcattgctggatgcgcgggaggcaattataccaatgtgatccaggcagcacatgcgcttcgcggcagaaactgcggcaatggggaatttacactctccgtgtatccttcctcacagccggtgttcatcgacctggtgaagaaagatgcagtcagcggactgatggaagcgggagccattatccgaaccgctttttgtggcccgtgttttggtgccggtgatactccggccaacaacggactcagtatccgtcacacaaccaggaacttcccgaaccgggaaggttcaaagccgggtgcgggacagatggcaggcgtggccctgatggatgcccgttccattgcggcgacggcggcaaacggcggaatgctcacctctgcagagacaatggactgctggggagatgtgccggattatcactttgacgacacagtatataagaacagagttttcttcggctatgacagagctcaggaaaaagaggaactggtatgcggcccgaacattaaggcatggcctgagatgagtcctctgaccgataatattcttctcaaggtatgctcaaagattatggacgaagtcacaacgacggatgaattgattccatccggagaaacctcctcataccgttccaatccgcttgggctggctgaatttaccttatccagaagagatcctcagtatgtgggacgtgcgaaagaagtaaatgagctggaaaaactcagaaatgcaggtgtgaacccgtctgagaaagcgggagagcttgagacagtttttgaggggatccgcaaggttcccggcagtgagaatgtaaaaccggaggaaacggaaatcggaagcatgatttatgcggtaaagccgggggacggttcagccagggagcaggccgccagctgccagagggtactcggcgggcttgccaatatcgccagagaatacgcaacgaaacgttaccgctccaatgtgatgaactgggggatgataccgtttctgatggataaagaaccggaatttgaggtcggagattatatttacattccgggtatcaaaaagattctgaacggtgatttgacagatatcagagcatatgtgattaaagatgaagttcaggaaatccggctccacatcgctgatatgacgcctgaagagcgggagatcgtgaaggcgggatgcctgattaactataaccgtaacagataaataaagaaacaggaagcagatatataaagaggcaatgcataaaaggcatgccggggatgataaacaatctccggcatgccttttatgttcagctgcagggccgttattttagaaatgaatcacctggctgctttcctgaatccgctttacgacttcaccggcttcctccgagagaaaataccgcagggtgctttcagggacaagctcccgtatctcttcaagcctgccttcatgtattttccggcgcaccgtggaagcgctgataaccccggatgcagccgtccttcttgggataatccggcattccacgccggacaaaggcagttcggcggccataatttcgttatatatccctgttacctggctggccggttcttccccgacataacgcaccgtgatatcaagagatttggcaatttggccgaatatagcagtatctaatttcgcgtgggtgcggattaccgtatccttatccttcaaaaaataggagggaaaggtggcattggagattagatagcttccggtctgatggaaaacaaggtttttcagatgggcgctgccttcctttaccaggttatagcgcacgtcaaatgggacgagggaagcatcctccgatacaataaaaacatgaagcagtcggcaggcggccgctgccgtggcaagcagataaagatggcccagagtgaaaggattggcattcatcaccacggcgccgacaggaagacctgcctccggttgcgcgtctgattgttgaacctgttcctgtgtttcctgataaaggttatcaagataggaggcaaaaccgttttttctgttttccatgaaaacaactctgccgtccgcgcgggcaacttcatagaagccgaggtcacggaagaaaagcgccttatcatatttcgtgtagagaaacagatttaccgttccctgttcgaattcatattggattaaatggctgaccacctggtttaaaagaccttcccctgatgaccggaatccacggccatgcatcggagggtgttggcaaagcaggagcctgttgctgcaaggttgtaatcgtcgtcgtataaaccgatggtgtaatccaggttatcatcgcgttcaattccttctttttccagaagggcgtccagttttttcatttccctgcgatcgttataaaaaattcggctgatgtgatattctgacataaaattctccatttcctttattaaagcggacgactgacatccacacttttcgctgtacttccagaactaaatccggtattcctagtataccggattttgtctccggccacaagaggccgaatccggcttttcgatgaacagtaacgtatattagttacagttcaccccgccaaaaagcggcgtgctgcaaacaataacacgcttcgcgatgcacagaaacggcaaaaagcgccgttgattgtggtgaaaagttcacttttcatcgcgtcgcgccgtaaaactcgggattttcgtgcaaaatgcgcacgaaaacacctcgcggaatacaaccgtgtgaacagtaacgtatattattcaaataagaacacagaatatcataaaaagaataaatttggaatgaggaggactgctatgctggtgcaggaattaaatgaacggtcacatgattttgctggtagaaataataagcaggagaataaaagggagaatacggagacccagagaatgaagaactccggtaatgagccggaacaggaacaacagaaaattaaaaatgaggaggccagggaagaacggattaaagaaaccggccaggtacttctggaggagggtggagagggcgctcatatccacctgatttccatcattggcgagattgaaggccatgaaaatctgtcgggaaatacaaagacaacaaagtatgagcatatcctgccaaagctggcagaaatagaagacagcagggaagtggacggagttctcgtcatgattaacacggttggcggcgatgtcagctgcggcctggccctggcggagatgattgcctccctgagcaaaccaacggtatcccttgtaatcggcgacagccattctatcggagtccctctggccgttgcgacggattactcctttatcgtacccacagggacgatgatgatacatccggtcagaatgtcgggaaccgtgatcggcgctgttcagacatacgattattttgaaatgatccaggacagaattcttaactttgtttccggccattcccaaatcgcctatgatcaattgagacgcctgatgctcaatacggaaatgctgacaaaggatctggggactgtactggtcggcagcgatgcggtaaaggaagggctcatctgcgaggtgggaggaatccgtgaggctcttcaaaaattgaaccggatggttttagagagaaaagagatttaactgaggctcagaggacgcgtccggaacggaccatgtccggtgtggtgggggagcctgtctgagtcttccgtccctggttggaggttgtcgtgagggggaatccggccggaatgaattcttacggggaccgtttgcacttatcgaagcgcatagccgtgctaaattcgtgagaaacctcattaagcacgaatgggcttccatgtccccaccagaattgattccgcctccttccccggtcagggtttcgccagggacggatgactcatgcggaggttttcgcgacaccggacatgaatggaaggcatatcgtattttccgcacacggcagcgctgagtggccgcgacaaggtccgcccccgcacttagcgcgtgagacaatcagcggccgcaggacggcggacagggacgatacacccggcggagtctttcgtcccggcgataaccttccgggagaaggagataccgccgacatcttcctgcggagaaggagagaaggatatccggaaggacgttcacccgagagacgatagctcttaggcagaggaaggcaaagtgtaccgggcggattttggcccttcaagggcaaaatccgggacaacgtaagcttcgaactcatccggagttcgaagtgaatttgtccgataccccggtgtgctttgccttcctctgtcttagagctatccctcaaaggggcagtccttccggatatccttctctccggctccgcccagcgaaaacaaaaccgcagtatctccttctccagccagcaatgccacttcctcgggacaaaagactcataacaccaccttgccaccccgtccgctggcctgcggcggcgtcctcacctgctcaattaaatctccattgcttttttcctcatttttttgtatactatgctaagtagaagatagaaaatatgtttggaggcttagagacagtggcaggcacgagcagaaagaaacaggatacgggcagcaggaagaagcaggcaggtacaacgggtacaaagcgttcaggcacgggaagaaaaaagacggcgccggccgtcaatgagaatagttttatggggacagaagtggcgattattgtatcatttgcagtatcggtgcttctgtttttgagcaattttggactttgcggagcagtcggcgatttttgccggaaggtgatgcttgggatatttggaagtatgggatatgcggctccggtacttctttttttgggaacctgtttttatatgtccaacagaggaaattacagggcatttttaaaaatgggggctgtggctgtggtgcttctcgcactgtgcggccttgatcagatgatgtttggcggcggaatgaaggagggctggaaattaagccagtactacgtccagtcgggagccggcggtgacggaggcggttttgccggcggtgcgcttgtcatgatcttaagctccgcccttggttcggttggaacttatctcgttcttatcgtggccctggttctggcgccgtatgcatcacggagaagtcgcttgtcagtctggtaaagaaaggcagcggacgtgcctatgaatatgccagggaggatatgaacaggagacgcgaaatccacgaggagcgcagggaagagagaaggcgcatgagggaggaacagcgtgtgcggggcgtggatcttgacgctactaatttaaatgacgttccgttaatgagagaatttgccgccggaataccggaaggaaccgtcctggcggaggatgcaggacaggaattccaggaagacgacaggcagttccagacagatgggaaagacagggaagcgtccgccggacgtccccagaatcctgcagatatattccgcgggagtattgccctgcctcagtatgatcccgaggcggacatggaagaggcagaggagacaggacaggctgaggcaaaagctgctgcctctgatgaaaccggtaaaaggcgaaagagcaggaaaggcagtccgcaggaggatacggatgatatcctgaagaatatttacgtcagacgggatacgagaaccttcgaggaattttccggggaggaacgggagataggcggaaggcatcccggatttaccgcggtacccgcagaagattatggtgaaacggaggtcccatgggagaacacggatgcccgggacgtctatgattcggatgtccgcccggagccgttcgggaaccttatccggaagccgggcatttcgacgattcggagcaggtggaacgcttctatgaagattgtgagggtacggagccgtacggcagcgccaaagcgtattaccgggaagaagatttatccgttaacggcagtgattcggagcaggaagaggggctcaattatgacggcttctatatcccggaagagcctaagactgttgtgaccgcatccggcaaaattattgagacggatacggagatggtgcgcaaaaccatagagaaaaagagagtagagaagaaatctcagccggaggatgaattatccctcaatgaacagatagagaagcgggcagaggccgccaaggttgttaagaaagaatacatagtaccgccgttgaatctgttaaagaaaggcgcgaaaaacagcggaggcttctcggaaaaagaatataaagagaccgccatcaagctgcagcagacactgcagaattttggtgtgggcgttacggttacgaatatcagctgcgggccgtcggtgacccgttatgagctgcacccggaacaaggggttaaggtaagtaagattgtcgcgctttccgatgacatcaagctgaatctggcggctgccgatatccgtattgaagcgccgatcccgggcaaggccgccgtggggattgaagtgccgaacaaagagaataatgtggtgcttctgcgggagcttttagagtctgaggatttcaaacgccacggttcgcatatggcctttgccgtcggcaaggacatcggaggacaggtggtggtcaccgatattgccaagatgcctcatcttctgattgcaggcgcaacgggttccggtaaatccgtatgtatcaatactttgattatgagcgtgatatacaaggcaaaaccggatgaggtgaaactgattatgatcgatccgaaggttgtggagcttagcgtttacaatggaattccccaccttcttatcccggtcgtaaccgatccgaaaaaagcgtcgggagcgctgaactgggcggtggctgagatgaccgaccggtataataaatttgccaaatataatgtcagggatcttaaaggctacaatgcgaagattgagtcgattaaggatattgacgacgacaataaaccggaaaagctgcctcagattatcattattgtggatgagcttgcggatctaatgatggttgctcccggagaggtggaggattccatctgccgtctggcccagctggcccgtgctgccgggatccatcttgtaatcgcgacgcagcgtccgtcggtaaatgttattaccggccttatcaaggcaaatatcccttcgagaattgcattctccgtatcctcgggcgtggattcgaggaccattatcgatatgaacggagccgaaaagctgctgggcaagggcgatatgctgttttacccgtccggttaccaaaaaccgcagagggtccagggagcttttgtgtcggatcaggaggtgtcacgcgtggtggaattcctgacggagcagggaatgacggctgattataatcctgaagtggaatctaaaatcagcaccgcgtccttcgcggaaggaccgtccggcggaagtgaccgtgacgcgtattttgtccaggccggccggtttattattgaaaaagaaaaggcatccatcggtatgctccagagaatgtttaaaatcggtttcaacagggcggcaagaattatggatcaattggcggaggccggtgttgtcggcgaagaggagggtaccaagcccagaaaagtcctcatgacgatggaacagtttgaaaatatgatgaatgaataagcattaaaaaatcacagcgaataagcagaggacggaaacacgatttaattccggaatgcgtatgataggatcaggaggaattatgaatgaaactgagagaatggcttaaggaaatggaatatgagctcctgcaggggaatctggacgaggaggtggatgacgtcgtctacgattccagaaaagcggctgccggttccgtatttgtctgcatgcggggcgccaatgtggattcccacaaattcatcccggatgtaattcagaaaggcgcaaaagtgcttgtaacggaggaagcggtcacagtccccgaagaaattacagtactcagggtcgggaacggcagaaatgccctgtccctgctttcggctgcccgctttggttatcctgccagaaaaatgacgacgatcggcgtaaccggaacaaaggggaaaacgacgacaacctatatgataaaggcgatcctggaagcggcaggtgagaaaacaggattgatcggcacaaatggggcgattattggaagcgaccattttcctaccatgaatacgactcctgaatcctatatactgcaggaatatttcgcaaagatggtggaacagggctgccggtatatggtgatggaggtatcctcccagagctatctgatgcaccgggtggacggaatctttttcgattactccatcttccttaatatttccaacgatcatatcggtccaaatgagcatgccagctttgaggaatatctgtactataaaaaactgctgctgcagaacagccgtgtctgccttgtaaacagggatgacggacatttcagggaaatcatcgaaggtgccaaagcggaaataaagacattttcaatggaacacagtgcggatttcagggccgcagacgttaaatacataagggaacatgactttgtcggactggactttaagatggaggggattatgagagcaggctgagagtgaatgtcccggggctctttaacgtatataatgcaatggcggctgccggggtatgcagctgcctgggactttctaaagagcgggtggcccatgctctggagcatatgcaggtggacggccgtatggaaattgtctataaatcggcaaagtgcaccgtgattgtcgattatgcccataacgcagtcagcatggaaagtcttttgatgacgcttcgcgactataagcctaaacggcttgtggttgtctttggctgcggcgggaaccgggccagggacagacgctattcgatgggagagattggaggaaagcttgcggatctctctattattacggccgacaattcccgttttgagaagacatccgatattctggccgatattaagaccggtctttcaaggacagagggaaaattcatagagattcccgatcggcgcgaggcaattgaatacagcctgtcacatgcgcaggaggggatatcattgcgataatcggtaaaggccatgaggattatcaggaaatcgaaggtgtcagacatccgttcctggacagaaccgtggtgcaggaagcagtgcaaaagcttgggctgtaagtgtggcaaagtacgattataatatataacaggcagaaatgccaaaaataatgtctggagtaacagaaaatggaaaatatcagaataagagacatcgtggaggcggtaaacggccgtctcctttgcggcgatatggaaacatccttaagacatatcagcattgattcgaggactatgaaggggacgatttgtttgtccctcttatcggggaaaaagcggatgcccaccgttttttaagccaggcgttcgaaaacggcgcggccgcgtctctgacctcggagcatgacacatgtcctgagggcataacaggcgccctaatacgggtggaggatacaaaaaaggcccttcaggacattggccgctatatcagaagccgcctttccctgcccctagtcggaatcaccggaagcgtgggcaagacgacgacgagggagatgatagccgccgccctttcagccggatacagaaccttcaagacacctgccaatcacaacagccaggtgggagttccgattacaatttccgatatttcggaggcagatgagatcggagttctggagctggggatgagtgaaccgggggagatggaggtaattgcagacattgcccgcgtggacacggccgtaatcaccaatataggggttacgcatatcgaaaatcttggttcccgtgagaatatcctgaaggagaaactccgtattcaggatggaatgaagaagggcggaaccctttttctgaatggagataatgagctgctgcgggatgtccgggcaaaggacggctgtgagacttctttttacggacttggtgcgaattgcagctaccgggccgtcaatatcacatataacggaggccgtccggcattcgatatggtacacggcgctgcggtggtgccggtcgtccttgaagtgatgggggaacacaatattctcaatgcgctggccgccctggcagtagccgatcattatcatgtgccgctggccgatgccgcagaagcgcttaaaacctttgatggttttaaaaaccgccagcagatttatgaaaagggaaacataacgattatagacgacacatataatgccagccctgactccatgaaggcgggaatccgtgtcctggcatctctgacggacaggaagagaagaatagccgttctggccgatatgaaagagctgggagaagatgctccgttattccattatgaaataggagctttcctgggagaacagccggtagaggaagtcataacttacggagcgctggcaaaggaaattgccagaggcgtggaagggaaagtaaagacaaccgtgtttgaggaagagcagaaggaagagatgacggaatatcttgagaagctgctgcgggaaggtgacgcagtgctttttaagggttcgaacagcatgaagctgggagaaacggccgcacgttttatatgagagaagggcttttcagcgttaaagaggagacagacgataatgacgagctacgcctatgccgatgtaatcattgatatatcccacgagaaggtcgaccgtgcgttccagtatgggataccaaaagggctggaagccgaaatttatgtcggagtgtgcgtccgtgtgccttttggaaaaggcaatgtgacgagaaagggctatgtggtaggtttaagcaatacgcctgaatttgatacggagcggatcaaagagatagctggggttgtgaccgggagcatatcggtccagtcccagctaattcagcttgcatggtggatgcgtgaaacctacggcgccacaatgaaccagtccctgaaaacagtcctcccggtaaagcagaagatgaaacccaaagaaaaaaagagcatccgctgcctgctggacagtgaggagcttgatattgcgatacgggaagcggaaaagaaaaatcataaagccaggctgcgcctgttaaatgcatttagagagacgtccgtgattccttcggagatggccgagtcgcagcttcaaatcacaccgtcgaccttaaaaccgctgatagacaaaggccagattgaaatcctgaccagagaaatttacagaacgccgtttaaagagctttcccataccggccatgccgctatcctgaatgaagaacagaaaacggcggcggaccggttcatccgggattatgaagaaggtcaccgggacacctatcttcttcacgggattaccggcagcggaaaaacggaagtatatatggagttgatggaatatgtattgaaacggggacagcaggttatccttctgataccggagattgcactgacctatcagaccgtgatgcgcttttataagcggttcggcgatcagattgcgattatcaattccaggctgtcggccggggaacggtatgatcagtgggaacgggcggcaaagggtgaagtatccgttatgatagggccgcgttccgcactgtttacgccgtttcaggatctggggcttattataattgatgaggagcatgagggagcctataaaagtgaaaccatgcccaggtatcatgccagggatgtggccgcagagagagccaggctatgccgcgcggcgcttgtgctgggctccgcgactccctccatggaggcgtataccaaagccatggcaggagaatataagctgctttccctgaagaacagggcggcaagcggcagcgcgctttccagcgtggacgtggtggacttaaggaaagagatgcaggaaggcaacaaaagcatgttcagcagacggcttaaggagctgattgaggacaggctcagaaaaaaggaacagattatgctcttcatcaacagaagggggtattccaattttatttcctgccgctcctgcggggaggcggtgaaatgtccccactgtgacgtttccctgacgcttcacggaaccagccgtctcgtgtgtcattactgcggctattcggttccgcttatgaagctctgtccctcctgcgggtccccttatattgccggtttcggcgcagggacgcagaagctggaggaactgacgggaaaggcgtttccccaggccaggatcctgcgcatggatgccgatacaacggccagaaagggcggccatgaagagattctggcggctttttcagcccatgaggcggatattctgattgggacgcagatgatcgtaaagggccatgattttgggaacgtgacgctggttggcattatggccgccgacttgtccctgaacacgccggattaccggtgcagcgagcggacgtttcagcttcttacccaggccgcagggagagccggccggggaagcctgtccggcaatgtggtgattcagacataccagccggaacactatgccatcgttacggcggcagaacagaactatgaagaattttaccgcagggaaatgctttaccggaaaatgatgaactatcctccggcctgttacatggaggcggttctgtttgccggaaataatgaaaagacggtggagcgctgttctgaccttgcgctttcgacagtgaggaagatgggatatgaagaaaatgagatacagatgatcggcccagtcagggccccggtctacaaagttaatgatatatacagaaaaattttatatataaagagtaaaaattgtgatatacttgataaaatcaggagaaatatcgagttgctggcagccggggatgaaggatttaaatcgctggccctgcaatttgatatttcataagctgacatatggaggaaaagaaaaatggcaatcagatcaatcagaacaatgggcgatgaagtcctcacgaaggaatgtaaaccggtaaaggaaatgacggaacataccgccgaattgatagaagatatgtttgagacaatgtatgaggccaacggcgtcggcctcgccgcaccccaggtgggaatcagaaagcagattgtcgtaatcgatgtggatgacggcaaccagtatgtgctgatcaaccccgagattgtggagacggaggggagccagaccgggtctgagggatgtctgagcgtgccggggaagaccggtgtcgttacacggccggagaaagtaaaagtaaaggccctgaacgaaaagatggaagagtttgagctggagggcgaaggactgcttgcaagggcaatctgtcatgaatgcgaccacctgaagggccagctctatgtgagcctcgtggagggcaaactggaagatgtgatgatggaagaggtagaggaataagatgaagattgtatttatgggaacacctgatttcgcagttcccactctggaggcgctgataagaggaggccatcaggtggccgccgtcgtaacccagccggataaaccaaagggcaggggcaaagcggtgcttatgactcccgtcaaggagaaggcaatggaatacggtattcccgtttaccagccggccagggtgaagcaggatgatgaatttttccaggtgctgaaagcgctttccccggatgcagtcgtcgtgacggcattcggccagatacttccgcagcggattctggagcttccgagatacggctgtatcaatgtccatgcctccctgctcccgaggtaccgaggttccgcaccgattcagtgggccgtgatcaacggggatcgggaaaccggcgttaccacgatgatgatggatgccggcctggataccggagatatgctggagaaaattgtggtggaactggatgcgaaggagaccggcggaagcctgttcgaccggctcagcctggccgggggcgaattaattctctccacccttgaaaaggcggagaaaggcacgcttgtcagaacaaaacagccggaggaaggcgcatgctacgccggaatgcttgacaaggctcttggaaaaatagactggagcagggacgcggaggccatcgagcggctgatacgcggcctgaatccgtggcccagcgcctatactgcctttgagggcaggacactgaagctgtgggaggcggaggtgacggatgagtgcagtgacggacaggatgagtatggcaggattgtcaaagtggaaaaagacagctttctcgtcaaaacgggaaagggctgcctcagaatacgccagctgcagctggaaggaaaaaagaggatggatacgtgtgcttttctgcgcggatatccggttaaagaggggattattctgggataagaatgtaacagtttgatgaaatgcctgactattttggattttcgaaaggagttttattatgcccggatatggaatgggatactatcgtttttttgatcctacaatgatacttgttttaattggagttgttctttcgatggcggcgtcggccaaagtccagagcacctttgccaagtattcccgcgtcagaagcatgacggggatgaccggcgccgaagcggctaaacggctcctgaattcccaggggatttacgatgtacaggtccgtaaggtggcgggaaatctgaccgatcattacgacccgaggaataagacattaaatctttccgaatctgtctacgattcgccgtcggtagcggcaatcggtgtggcggctcacgagtgcggccatgccatccaggacaacacggaatacgcacctttaaaaatccgcggcgctattgtgccggtagtaaatatcggaacccagctttcctggcccatgattcttctgggcgtattattcggaggcctgggctctccgctggtacagattggaatactgctgttcacgctgtgcgtaattttccagcttgtgacactgccggtggagtttaacgcctcctcacgcgccgtacggcttctcgacgagacgggaatcctgtccggagaggaagtgggatatacgaagaatgtcctgggagcggcggccctcacctatgtggctgcggcagccggctctattttacagcttctgcggctcctgattctgtttggaggaagaagagatgaccgttaaagaaccggcgctgcgggagatcatcctggatattctgctggaagtactggaaaaaggcaaatacagccatgtgatcctgtcacaggcgcttacaaaataccaatacctggaaaaacaggaccgctccttcatcaagcgtgtggtggacgggacggtagagtaccggattcagctcgattatatattaaattcatattcgaaagtaaaagtaaataaaatgaaaccggtgatccgcaccattctccggatgtccgcctatcagatctgccatatggaccgggttccggattcagccgcctgtaatgaagcggtgaaactggctgaaaaacgcggtttttccggtctcaagggctttgtcaacggagtccttcgaagcatttccaggggaaaagacaatctggtgtttccggatgattctatccgctattccatgccggaatggctggcctccatgtggaaatcaacatacggtgaggaaacgttccggcggatgatggagagctttttaaaggaccgccccctgatggcaagattatgcctgaaccgggcggaaaaacagcagatcctcgattctctgggcgctcagggcgttaccgcaaaggacagccgttatgccgatgacgtaatctgtctggagggagtcgattatctggagggacttgaggcattccgggagggctggctccagatacaggatttgagttcttccctggccggcgatgcggcggggatcaaagacggagattacgtaatcgatgtctgcggcgctcccggcggcaagggacttcatgcggccgatatcctgggaggcaccggcatggtggagatacgcgatatcagcgaggcaaaggtatcgctgattgaagagaatatcggcaggagcggtctgacaaatttaagggccgccgtatgcgacgccctttcctttgatcctgattcggaggaggccgccgatgtggtaattgccgatctcccctgctccggccttggcataatcggccggaagccggatataaaatacaatatgacgcccgagaaactgcatgatctggcctgccttcagagggagatactctccgtagtgcagcggtacgtcaagccgggcgggacgctggtttacagcacctgcaccgtcaacagagaagaaaatgaagataatatgcgctggttcctggaacattttcctttcgagccggtgaatctaaaagggcgtctcggagaaaaactttcggagccgtctatggagtctggatatatccagttccttccgggaatccatccctgcgacggattttttattgccgtgatgaaaaagtgcggctaaggagtgttatgaacaaaactgatatcaaatcgctgacgcacgaagagcttcaggatttattaaagggaatgggagaaaaaccgttccgggccggacagctctaccggtggatgcatgaaaaactggctgcttcgtttgacgaaatgacaaatctttcaaaggatctgcgcgggaagctggcagagaactgtacattcacggcgcttaagccggtatgcgtaagaatttcacaaattgatgatacaagaaaatacctgtttgaactggaagacggaaatgtgatagaaagtgttctgatgaaatataagcatggcaattcggtctgcatttcctctcaggtcggctgccggatgggctgccgtttctgcgcctccacccttgacggcctggagagaaacctgactccgtcggagatgctcgatcagatttaccggatacagagagacacgggagaacgtgtttcaaatgtggttgtaatgggttccggcgaaccgctggacaattatgataatcttatccgttttatccggctgctcacaggcgaaggcggacttaacatcagccagagaaatgtcactgtctccacctgcggcattgtgccgggaatccggaagctggcggaggaagatttgcagattacgctggctctttccctccatgcaccgaatgacgaagtgaggagaacgctgatgccggtcgccaaacggtacggcttaaatgaagtgatggatgcctgccgttattattttgagaagacggggcgcagactgacatttgaatacagcctggttcagggagtcaacgataacctggatgaagctaaggctttggtccgtctgattaaagaccagcacggccatgtcaatctgataccggtcaatccgataaaagagagagaatacgtccagtccggccgccaggccatagaggcgtttaaaaaccagcttgaaaaaagcggtataaatgttactgtcagaagagagatgggcagggatatagacggcgcctgcggacagctcagaaaaagttttatcgacaaggaaaggaaagagggagaatgaaagcatatgccttgacagatgtcggccgtgtccggcaaatgaaccaggattaccagtttgccagcacagaacctgtagggcctctttcaaacctgtttattgttgcagacggtatgggaggccacagggcgggagactttgcgtcccgttatctggtggaacaccttgtatcctacataaaggaatgtgacgacaccggtgcggtatcggccattaataacggaattgcaaaaatcaaccgggaattgtatgaacagtcgcttacaaatgcagagctggcaggaatgggtaccacgctggttgccgctacgatcgaggattccatactctatgtcgccaacgtcggtgacagcaggctctatcttatcgagagggagggaatcagccagattacaaaggaccactcatttgtggaagagatggtctccatggggcagatggaccgtgacagcagtgaatacagggagaagaaaaatatcatcacaagagctgtcggcataggacgaaaagtggatgttgacttttttgaagtacctttgaaaagcggcgactacattttgctgtgttccgacggcctctccaatatggttgacaactccgcaatgttccgtctcgtgcttctgccgggttcacttcagatgaaagcgaaggctttggtagccttagcgaatcagaacgggggcagggataacatagccgtgatccttgtggatccccagataagcgaggtgagtccattatgatgctgcagccgggaagttatttacaggaccgatacgagatacttgctctcatcggtacaggcggcatgtcggaggtttatcaggccaaatgccacaaattgaaccgactggtcgcaataaaagtattaaaggaggaattcagccaggattccaattttgtcagtaaatttaagatggaggcgcaggcggccgccggcctttcccatccgaatattgtcagcgtctatgacgttgtggatgaaggtgatctccactacatcgtaatggagctgatagagggaatcactttaaaaagctatattctgaaaaaagggcatctcggggtaaaggagacgataggcattgcaattcaggtggcccagggaattgcggccgctcatgatcagcatatcgtccatcgcgacatcaaaccgcagaacatgattatttcccgtgacgggaaggtgaaggttgccgatttcggtatagcgagggcggtgtcttcccagacgatcggttcgaatgccgtgggttccgttcattatatttccccggaacaggccaaaggaggatacagcgacgcccgaagcgacctgtattccctcggaatcacgatgtacgagatggtgaccgggcaggttccctttgacggggaaaatacggtgacaattgcactggcccatctggaagaaccggttcttcctcccagccatttaaaccatgacgttacgcctagccttgagaggattatcctgaaagctacggcaaagaagccggacagacgataccgcgacgcatatgagcttatcgccgatctccgccatgcactggtagatccggaagatgaatatctgaagaaggaaccggagctggatgagtattcccctaccgtgatccgggacagaggggaagttgaattcgttcgtgatacgcagcgcagaacaggacctcttgaccagaactggaatggcggaattgatgttcctgttgtaaaaagagaaccgaaaatggcaaagccgccgtcgggcaaaaagaaaaaagaacagcacgatgatgtaaatccacagatagagaaacttttaacaacgattgggattgtcgcggctgttattatcgttgcggtggtactcgtaatctttgcaaggctgggaggaattttcaaccttggatccggaaacactattgaaaagactacggaggcctctgcccagtcggaagagacattaaaaagtacggaatgtaaggtgccgcctcttgtcggcctgaatgttgagcaggcggagcaggcattgagcgatgcctcgctgaaaatacggtatgaatatgccaaatcggctgatgaagagaggggatacgttatcaaacagagtgtcacttcggggacaatcgtctcaaaacagtcggaaatcaccgtcacggttggggaaggcagcggcaaggtggacttgacgaagctggaattgaatacgatgacaggcgatgaggcgaaactggttctggagtcacataacctgaaggttgaattgcaggaagaaacaagcgaagagacagaaaaaggcagggttctgcgttttgaaccggagaaagcggaaccgggctccagcgtaaaagttttcgtaagctccggtccggcggtcccaatggttcccatgatagacattaccggaatgtccgaggaggacgccgggacggctcttgaagccctgggactgacgcttggcgagcgcaaggaagaaaaaagcgaggatgtcgccaaaggcatgatcatcagtcaggacattgcggcccttacggatacgccgcagggtacggccgtaggatatacggtcagcacgggcaaaggaaaacagtatgtcgccgtaatcaatgacgatttcccgcttaaagatatgttcggccccagttccggagatattgagatcacggtccggattgtggcaatccagcaggtaaacggtaagcaggtggagaaggtgcttctggagccgagaaagatgggcggaaacatcacaataccgatccgctatacaataccgggagcggagggcgttttaaccggagaactgcaggtacaggatctgacgaataacaaggtactcaaatcctatccgctggaatatctggaggtagatgaataaggatgaacaagaccgatgaaaggtaagattatcaaaggcattgccggattttattatgtccatgacggccgcagtaaaatctatgaatgtaaggcaaagggtgttttcagaaacaggaatattaaaccgctggtgggagatgacgtggagtttatggttctggacgaaaaagagggaaccggaaatatcgacgcaatcctgccgcggaaaaacaagctgatccggcctgcggtttccaatgtggatcaggctgtcgtggtgtttgccgtcacggaaccgctgccgaacctgaatcttcttgaccgcttcctggtcatgatggagaggcaggagataccggttattatctgttttaataaaatcgatttatccggcggaaaagagatcgaagaactgagggccatttacggaccggccggttatacactccattttatcagcacctatgaagccgccggccttgaaaagctgcatgagctgattgccggaaaaaccacggttctggcaggcccttccggtgtcggcaagtcgtcaatcaccaactttctgcagccggaggccaggatggaaaccggtgttgtcagtgaaaagattaaaagaggaaagcatactacgagacattcggagcttttctttgtggagaacggaacctatatgatggatacgcccggcttcagttccatgtatatcgaggatttggagccaaatgaattaaaggactattttccggaattttctgaatacgaggaggaatgccggtttttaggctgtatccacgtgggtgagaaggtatgcggagtcaagacggcagttgcggatggtaaaatcagcaggagccgctatgataattaccttcttttataccaggaattaaaagacaagaggagatactgattatgattattttagcgccttccattctgggagcagattttaaacggctcggcgagcaggtacaggaggtggacagagccggagcgccctatatccatctggatataatggacggaacttttgtccccagtatttcattcggcatgcctttgattgagagtctgagaagctgtaccaataaaacctttgatgtccatatgatggtggaggaaccgggacggtatgtagacgatatgaaaaaggcaggcgccgatctgatttgtgtgcatcaggaggcatgtacccatcttgacaggacaattaaccagattaaagaggccggactcatgacaggtgtagccttaaatccggcaacacccgtgtcgacactgtcctgtattcttgaacaggtggatatggttctcatcatgtccgtcaatcccggatttggcggacagaagtttattccctatacactcggcaagatcagggaacttcggaatttgtgcaatgaaaaggaacttgccacccgtatccaggtggacggaggaatttcacctgccaatgtaagggatgtaattgaagccggagccgatgtgattgtagcgggttccgctgtgtttaaaggaaatccgactgagaatgtgaagactttcctggatatttttgaagaatatgcagcagttcagtaacaggccagatgcctgagctgttacaggaataaaacaaataatcataaagagaagtgaatagcgtatgaaaaagtgtttggttgttacgggaggttctattgatatttcctttgttaaagattttttgcaaaaccggagatacgactggattgtcgcggttgacgccggcctggagatactgagtcatctgcacattgttccggatgaagtggtaggcgatttggactcggtggatcctctggttttaagagaatataaggataatccgtccgtggcttttgagatccacaaaccggaaaaagatgagacggacacggaactggctcttttaaccgctgccaaatgcggctataacagtgtggatttactgggagcgctcggggcaggatggatcatgccataagcaatatccagctgctctatcagttttacaagcagggaatggatgtcagtatctatgatgcccagaacaggctgtatctgctgggaagcggaaaagtgttcaggaaatccgagatatatggcaggtatatttctttcatgcctctgacagaggtggtggaagggctgacgttaaagggctttaagtatcccttaaaccggcgcagaatcgtccttggaacttccctctgcatcagcaatgagctgaatggtgaggaaggtatcatggaagtagaaaagggggtccttatctgtgtggaggcgcatgactgaccgtaaactaaccggcgtcggtctgatgtacaagcacggagacggaaaaagtaatggagaatgaaaaacgcatggaagatttgaaaatgaggaacaataaagatggagcagcagcggctctacagcctaaaaagattgctgtgattaatgatattgcaggttatggccgctgtgcattgacagcggctattcctgtgatcagcgcattaaaggtacagtgctgtcctcttatcacggcagtgctgtcgaaccacgcaggatatccatcctgcttttttgacgattatacggatcgtatggtgccttacattgaagagtggaagaggctggaattttcttttgacgggatcatgaccggatttctcggttcagttcgtcaggtagagattgtcacagactttatccggcattttaagaaagaacataccaccatgctgcttgtcgatcccacgctgggggataacggaactacttacagtgtctgtgacagacagctctgtgagggtatgcgcgaactgattcagtatgccgatatcatcactccgaatctgacggaggcatgtattctgaccgacacgccttatcaggaaaagggatggagtaagagaaagctctctgatttgacttataaactcctgttaatgggggctggggccgtggtcctgaccggagttgtcaagggaagtctggtcatcaatgtcatccatgaaagaggaaaagaacctgtttttcagacagcgcaccacgcagaggggaaccatcatggaacgggagatgtctttgccgcagtcatcggcgccagcgccgtaaagggcgttgcactggaagagtcggtccgcagggcggctgctttcacaagaaagtgcgttgaacgttcggaggagctgggagttccggaaattgaagggctgtgcctggaggagtgtctgccttatctgatgaaactttaatcaggcaggtgagaacgctgccgggacggccagcggacggggtggtgagatgtgtatatgagtctttcgtcccgggggaaggttgtcgtgggttggggctgcggggaagataaaatctgcggagcacgctctcgctccctgaaatgcatagcggctgctagactcgaaaatacctcgtcaagcaccgatggatttcaaaggcatccgcagattttatcttcccctccgccccaacggctcagttttcgccgggacgaaagactccgccaagtgtgtcgcccgtccgctggactgcggcggctgattgtctcacgctctaagtgtggggaaaaccttgtcgttgccacgacatgtatctgtctgcgtttatttttttagcctgtcaatgagtaaggatgctgccagtagaagtggtggcagcaacagggggcatccccgcttgacggtggagacaatcagcggcggaagggacaagagccggtgtgagcgacaaaaactgcgcctgagtcttcagtccccgtcgatcaacctggctgggggaaggaggcggaatcaattctggaggggacatgggagtccgccggtgcttagtgaggtcttttacgaacttagcaccgctgcgaactccaaagagtgcgaacggtccccgtaagaattcattccggctggattccccctctcacgacaatctcccccggggactgaagactcagacacacaacttcaccacaccggaccttgtcccttccggacgcgtcccccattctcaactaaataatagggcttttcattaggaaaaaactgtagtataatcgacaaagatatggcagtcagggaaaaaaataatataatgcttcccggaaatagatggagattgcttgaaacaacaggaggaagagatgttagatttaaagtttgtcagagaaaaccctgaaatcgtaaagcagaatattaagaataaatttcaggacagcaagcttggccttgtagatgaagtgatcgagctggatgctaagaacagagccgctaagaaagaggccgatgatctgcgcgccaataagaataaaattgcaaaacagatcggcgccctgatgggtcaggggaaaaaggacgaggcggaggagatgaagaagcaggttgccgagcagtctgcgcgtctggctgcgcttgaggagcaggagaaggagctgggagataagatcttaaaaattatgatgtcgattcccaatatcatcgatccgagtgttccaattggaaaagacgacagcgagaatgttgaggttcagaaatacggcgaacccgtaattccggactttgaaatcccttatcatacagagatcatggagcgatttaacggaattgatctggacagcgccagaaaagttgccggaaacggcttctattatttgatgggagatatcgccaggctccattcggcggtgatttcctatgcaagagatttcatgattaaccggggatttacttactgtgtacctcctttcatgatccgcagcaatgtagtgacaggcgttatgagttttgccgagatggatgccatgatgtataagattgagggagaggatctctatctgattggtacaagcgagcattccatgattggtaaatttattgataccgtgatacaggaggaggagcttccaaagactcttaccagctattcaccatgtttccggaaggaaaaaggcgctcacggcatagaagagagaggggtatacagaattcatcagttcgaaaagcaggagatgatagttgtatgcaaaccggaagacagcaagatgtggttcgacaagctctggcagaatactgtggacttattccgttctttagatgttccggtaagaacgcttgaatgctgttccggcgatttggcagatctgaaggtgaaatcagttgatgtggaggcatggtctccgagacagcagaaatattttgaggtgggaagctgctccaatcttggcgacgcccaggccagaagactgaagatccgtgtaaacggccaggacggcaaatattttgcccacacgttaaataatactgtggtagcgcctccccgtatgctgattgcttttctggagaataatcttcaggcagacggttccgtcagaatccctgagccgcttcgtccatatatgggcggaatgacagagatccgttaattaatatcaatgtcaatgatgttggggtcaaaaggtcttttgaccccgttgataccggattgctccgcactgcgtggtatcatgtcaataaagttaataacagaaataagagagaagatattacgatgcggtgatatcttctctttccgtgtgagaagactcttatgaataaacatacaatatcagtgaaacaatttattaaaaatgagaccgtattctgcgctgcggcagctcttgcggcgctgtcctgcctggccgtaaagccgggaagagagtatctgggatacattgattacagaacccttgctttgttattctgtctgatggcgctggtagcctgcatgcaggaaatcggtgtctttaccatgctggggcataggctgctgtccggcacccacgggactaaaaaactctcctttatactggtaagtctctgctttttctgcagcatgctaattacaaacgacgtggctctgattacttttgtgccatttaccattcttgtttaccagatggtgggaaaggaagagcagctgctgaaactcgttgttttagagacaattgccgccaatctgggaagcatgggcactccgatcggaaatccacagaatctgtatctctactctgtatcaggactgtctatgaaagcattcatggagacggtattgccttatacgtttttttccatgcttctgctggggacttttttagccgttggtaagaatgagccgctatcagtgagggtgcgaatgggaaaaaggccggaggatgcgggtgtgtttatccgccgcctggccgtatatctcggactttttttcttaaatattctggtggttctgcattttctggcctggcagagcgttctggcggcggtgattttgtggatgctggcaaaagacaggaaggttttaaaggagcttgactatgttcttcttttaacctttgtctgcttttttatctttgtcggtaatatgaaacggattgatgcggttaacatccggctgatggaattaattcagggccgggagctggttaccggtattgctgccagccagattatcagcaatgtgccggccgctattctgctttcaggttttacggaccggtataagacacttctggcggccgtgaatctaggaggactgggaactctgatcgcatcccttgccagcctgatatcctacaaattttttgcaagaagctatcctggcaaaaaagggaggtatcttctggagtttacattctggaatcttgtttttttgatcccattgacgggacttgctctgttattaaattaacacggcagtatcccgcgatgcacagaaacacctcgcgggatactgccgtgtgaacagtaacctgcggtgttactgctgcttgtacgccacacacggacggttgcattttatagaaagaaagtgtagaatataaggcagaaataagtaacaggcaatcaataaaaatttggaggatgacggaatgaaatacataatcgtgcttggcgacggtatggcagatgagccaattgaggaactgggaggaaaaacacctatcgaatatgcggatactccggcaatggatcgcctggcgccgctctctgaggtaggacttgcagccacaattccggatggaatgaaacctggcagtgatacggccaatctcgcagttctgggctataatccgaaaaaatattatacggggcgttcccctctcgaagctctcagcatcggcgtcgatatgaaagcaaccgacatagcgctgcgctgcaacattgtaacactctcggaggaggatgtcccctatgaggagaggacgattcttgatcacagttccgatgagatttccacggaagacgcggccgttctgctcgatgcagtcaaagaagtctttgaaaacgaaatatatcatttttatgtcggcaccagctaccgtcatttactaatctgggataacgggaaagtcgtagagttgacaccgccgcatgatgtgctgacacagaagattggaaaacaccttcccgaagatgaaatgctaaaagaaatgatgaaaaagagctttgacattctgaatcatcatccattaaatgaaaagagagcggcacaggggaaaaataaggcaaattcactctggttctggggcgcaggaacaagaccggctttatcttcattttatgacaagacagggaagaagggagccatgatctccgctgtggatctgctcaagggaatcgccgtaggcgccggcatgagaaatatcgaggttcctggcgctaacggaggactgaataccaactatgaaggcaaagcggaggccggcgtgaaagctctgttggaggagggcgctgattttgtctatattcatgtggaagctccggatgagatgggacaccagggcagtgtggagagaaaagtaaaagcgatcgaatatctggaccagagattgatccgcattgtggccggggagatggatcgttccggcgaagattaccggctgttaattatgccggatcatccgacgccaatcagctgccgtacccatgtctccgatccggttccatatctgctctatgacagcagaaagaatgcgggacaggggctgctgtacagtgaggcaaacggaaagaaatccggaatactgataaaagacggatataaaatgatcgaccggctgcttcaggactgagccggtgatatacagcacggaagataacctgcacgcggcacgaacagtttgccggcatcgacaataacctgtacatttcgcgcacaggtcaccgccatcaattatacaggggaggcaggaatgaaaattcctgcctcccctgtatataaaacgatattatgcacacgcttcagcaggccgctgcagccaatgccgaaatcgcgccggtgcctgtttatttcatttactaaggccattatctttgcgcacggtcagaatatcagatcgcatggtcagaatatcaaatgtgcagctctgtctgaactgatactttactgaacttcttcaagcgttaattttggaattgccatcaatgaataatttgtatggtagattacgaatccaggtgcggaacccgccaccttcttaacggattttttctgaatataatcaatttccactttttcattgctgcggccttttgagtaataggctgccagagaaccggcctcctcgaaaaccctgtccggcagttcacgtccttccgacttcacaattacgtgagagccggggattccttttgcgtgaaaccaccagtcattaccggaagcgactttaaatgtcagctcttcattctgataattattctttccgacataaatatgaaaaccgtcggatgagatataatggaaaggccggctggtgattttgacctttttaccggaaggcccatgcttttttataaaaccgtattccgtcagctcctgcttaatctgtgccagatcttcctccttcagcgcaatatccagtgaagtgctgattgattccagatgttcgatttcctgctttgtttcctccacaaactttgaaagcgcctcataggtccgtttcagcttattatatttatcaaaaaatttctgcgaattttcacgggccgtaagctgtggatccagcgggattttaatcggttcatttgtataataattgatgcattccagttccttttccccgccgctcagctcgtatccataagtgtttaacagttctccgtaaaccttgtatttatctcttttttccgtatccttaagctgcttgagctgtaaatcatattttttatagcttctttccagagcggtctggacgattctgcggagatcggcagacttctgccggatacgtgtaataatattttttgaggaataataaagctccagcgtgctgctgatggattcataggtaactgtcttatattccgggggccaggaagtaaggggaagagcggaaaattccaccggttcctcctctttgtaaagaatattcggtgaaaaaaggccgtcccgtacctgctccatcgcaagcacaagagtccggctcaagtgggtcagttccagatcggagagagacgccgccggcacatcggcatcaattgaggctagatggcagaactcctcggccattacagggctgagacccgtaaagctggtataaatcgcttttcccgagggcgcctgtgaagcggagagagtttctttaaaaacagcctcatcagaggagagcggatcttttttcccggctgcctgagggataaaatagtcccttccgggaagcacctcacggacagagctgatctgggccgaaatatgtttgatactgtcgataatcttgtcatccggtgtgcagaaaataatattgctgtgttttcccatcagctccacaatcagatatttacggcagagatcgccgagttcatcgagatgttctatttcaaaacgtatgattcgttccagtcccggctggctgaccgatacgatttttccgtttccgatatgctttctcaaaagcatgcagaagttcggcgcagtcatagggctttgtttattcgtctgagtcagatagataagaggaagactggcatttaccgacataagaagccggtaactctccctgttattctttaccgtaaaaagaagctcatctttttcggtctgagcaatttttgatatttttcctccggtcagtttgtcgttaaattcttttaccagaccggctataacaattccgtcaaaggccataattggttgttcctttctaagctagtttccatattttttataataagctccaggcgccagagaaacagcgtcatggacagcaggtctgcacagcctcccgggcttatattgcgtttgataaaatcttcattcagccgtaccagctcattgattccctccggtgtttcagcgccgcccagcaataatacggaggaggcacactgctttacatactcaagggaagcatagtcggtcctgaacaggacattcgtatcgtccacattcgccatcagattcaaaagtatatgcagggaaaggcggttctgcagcccgccgccgcagtttgttccattctccgggcggctcagaaactccctgagagccggaagcccgaaatgccgtacggcagggaaactgtcagcggcttccccgcggataccacggatcccatatttcagatagagatattccccatgggattttggattgcccggttctatttcggaaaaatcacgttccatggaagcgcggcacattttcccgcagtagaataaaatatcatcggcgctcaccgggcagcgttttttaccggaaagctcggatgcgtcgtcagacagtaaagagcaaaacagaaagcctgccgaagctgctgcaagtcccatggaaaaaataatgcctttatgggtattaacgcctcctgtcgcagcgaacatggctttttccgctttgactccggacggacggattgctttaaaaaggcatccggcagccttatccggtgactcttcggacatcttatccccccaggaggcgcctatgccggccatctcctttataaagggcagaattgcccggatactgtcctcaaaagtcaggtaatccatatcgctgtgggctccgctgtcttttcggtccacaagccctggctttggggtggcggccacctcgtcggtgagagagagggacgcagctttttccaaaagagccagaaatcggtctgtgatcatttgtcttgtcattacttctttaacattcattctttcatcctgtcattatccggaactttactggtattccccagaagtttttcaatatgcatgaccagttcttccacgctgtggcggcggctccggctgcattcatgtgctgggcgtccgcagatgaggcaggttcggcacggcctgccggtttcctcccttgaaaccttgcatccatcctgcctgataatatcaatatcataaaggcggccgaccgaagtcccgtcctccagctccgacatcaggcatttcaggacaagaggggaagcatcggcggcaaaaaaagcttcatatccggtcttttcacggacctcgctttcatgataaaccgtgatagccgagtcacagagcgcctgtctgatttttcggaccccctcctcaaatgtttcaggtatcttgtcaaatacctttaccggtcccggaatatttaatgtaaaactgataatcggtttgttatatgtctgaatcagggagttttgcagaaagacgcggcgttccctggcgtccagcatttcttcaagcgttacctcattattccctgccaaatccattttaacatcctcccaaatcactgtagttatttttacctgaagctgccctgactgacggacttttgcagggggacagcttctgatattctattataaagaaaaagtacggttataacaacaaatattttaatgatttagttgagcaggtgaggacgccgccggtacggccagcggacggggtggtgggtggtgtatatgagtctttcgtcccgggggtattggccccgtccactggcctgcggccgctgaatgtctcacgcgttaagtgcggggcggaccttgtcgcggccactcagcgctaccgtgtacgggaaaatacgatatgccatcaatgggcttttcaaaaaattgcggaagattttgatatcggcctgccggaaacacgtagtggcgcgacagggccctccccatttaaggttggagacaatcagcgaccggagcggaccatgtccggtgtgcgaaaaccttcgcctgagtcttccgtccctggcgaaaccctgatcgggggaaggaggcggaatcaattctgcaggggatatggaagcccatccgtgcttaatgaggtttctcacgaatttagcacggctatgcgcttcgaaaagtgcaaacggtccccgtaagaattcattccgaccggattcccctcacgacaaccttcaacaagggacggaagactcagccatccccctcaccacaccggacatggtccgttccggtcgcgtcctccaaacctcagttaaatctccaataagttttttcctatgaactccataacagcattagtatttgaattataccttttaccatgttactatatttttagaaaaaatgtagaaagactctatgaatattctaaaaaaagtaacaatatacacaaataatgccttaaacaaatcatgtaatacaaaaaaataacggtaatcaaatggaggaggaattcttatggtaatcgaaaaagcggcagttgccggtacactggaatccagtgacgctcagattacggtagagccgggcggcggaaaggtggagctgacgattgaaagcagtgtaatccaccagtttggaaagcagatcagggcggtagtattggagaccttggagcgcctggacgtaaaggatgctaaaataaaagtagtggataaaggagctttggattgtacccttaaagccagagtagaatgcgccgtttaccgttcagccgggataacggaaaatcttccatggggaggtgtgataaggtaatgagccatccaaacaaaaaaagactgagaagatccatgatgtttttaaactgccagaaacccggactaatcaaggatccctatatttataaaccggattccatcatgcttgatttagaggacgctgttgcggaaaaccagaaagacgccgccagatattctctgtttcatgcgttaaaagaaattgactatagaggcgttgagagggttgtccgcattaacggacttgacacgccccactggaaagaggatatccgcgtctgtgtggcaggcggagctgataccatccgtattgcgaagacagagacggccgaggatgtacatacggtggaagagcatgtgctggcggccgaacgtgaattcggacgtccggagggaagcacacttttaatgtctgccctggaatcctgcaaaggcgtgctgaatgcccgggaaatctgcgtttcttccgaccgcctgatcggcatcgcattatcaggaggcgattatacaaaagatctccaaaccgtaattacagggacgggagtggaattaatgggcgcaaggcagcatatgattatggctgcgcgcgctgcaggcgtccagtgctgggataccgtatttactaatcttgatgacatggacggttttgaaaaagatacagcaatgattaagatgatgggatttgacggaaaatcccttgttaatccgcgtcagattgccgtagttcataagattttcacccccacggaaaaagagattatttttgctgaaaaggtagtgcgtgaaattgatgacaagaaagctaaaggcatcggcgtgtttacggtagatggtaaaatgattgatatcgctttctatgacggggccaaaaggaccctggctatggcaaaagccgcaggcgtttatgagggggatatgtaagatgataaataaagtgggaagagatattccggaagaaattttaaaggcgaccggcaaaaagatctttgaaggcgcctatgtctatgataattttgaatataaaaaagccgcgcctgttgtgcgtgcggtatctgatccgagacgttccaaaatggtaacgtccatcagggaggttcttgaaaaatgtgatatccgtgacggaatgaccctgtccttccatcatcatttccgtgaaggagactatgttgtaaacatggttatggaagagatccatcagatggggatcaaagacttaaccatctgtgcaagctcccttggcaaggccaatgatccgattgtaccgtttattgaggatggaacgataaccggaatccagtcctccggagtgcgcggtaaaatcggtgaggcaatatccacaggcaaacttaaaaatctggcaattatgcgttcccacggcggccgcgtacgcgccattgagacaggcgaagtccacatcgacatcgcttttatcggagcccctacctgtgacgaatatggaaactgccgtccgaacggcggtaaaagcgactgtggcgtattatcctatgccatggcagacgcccaatatgcggataaggtagtggctataaccgactgcctcgttccgttccccaatattccggccagcatatccatgacaaatgtggattatgtgtgtgtggtggatgcgatcggcaatcctgacaagattgcgacaggggccgccaaaccgactacagatgtgagaaaaatcatgatggctgattactgtacccagtttgtcatcaacacaccttacttcaaggacggcttttcgtatcagacgggtgtcggaggggcctccatcgcctctacgatttcgctcggcaaaatcatggaagagcgcggtatccagatgggtctgggactcggaggtatcacaactccgatgtgtgaacttttggaaaaaggactgatccggacgcttgtggatacacaggattttgatcagggagcaattgaatcgatcaagaaaaatccaaatcatattgaaatatccgcatccgagtatgcaaatccgttcaacaaaggcgcttatgtcaataagcttgattttgttatcctggcgtccctggaagtggacgtggactttaactgtaatgtggtcgtcggttctgacggcgttattaccggcgcacagggggccatcccgacacggcagccggagccaaatgcacgattgtgattgctccgcttttgcaggggagaattcccgccatctgcacgaatgttacgacagtgacgacaccgggagagactgtggatgtcgtaatcactgattatggcattgccatcaatccccgccgtcaggatctgattgagtgcatgaaagacgtgaatctgccgttctgtacgatcgaagagctgcgcgacaaagcatatgcaatggtcggtgaaccggagccggtacagtttggggagcggattgtaggaattattgaaggccgtgacggtacggttatggatgtagtgcgtgaaattaaagaatattgctttgaatagaaacggtaacctgcacgctccgcgcgcaggttaccgccaataataataaagcctcatagccggattacccggatatggggctttttatttaacaggaaaatactcctgttaaataaaaaccgctccgcggaggatcacacagcggcggtagggaattatgccgctgaagcgacccgccgctggcggagaatcccgcaagcgggattctttcgtgtttaacaggaaaatactcctgttaaataaaaaccgctccgcggaggatcgcacagcggcggtagggaattatgccgctgaagcgacccgccgctggcggagaatcccgctctgaaatggatacgcactgcgtgttaaagcggtttgcccgctaagcggccgcaatccttcctcatatccgacggctgattttcagtaaatttcatttacgggaatcagggattgcacgtgtaaaaatacaattaatgtcactttgaacaaaaatcaggcttttaggaataattgcaaaattaccatatttttgattttgatgtaaaattttcgtaaaaaatccttattctataaggttttgcgaaacataagtaaaatcctatgtatgatataattgcacaattattcttcgttaaaaccaacaaaaattgtgtaattcatacaaaggctgttgaaaagctgctaaaaaaatgtataatataatcaagggctgaaggaacagtccacacagcggcaagacaattaaataaaagaaaaggagaagaggttatgaaaaaaagaacattaagtctggcattggcggcagcaatggcagtcagccttgcaggatgcggaagcagcagctccggtactgcagataaaccggctgaaactaaatcggcagaaggcgcacaggacacaggagcagaagaggcggccagtgactggaaatgggaaagaaacgttgagattatctgtccatggggtaccggcggcggagccgacaccacactccggacatttgcttccgctcttgaaaaagagcttggcgtatccgtagtcgttaacaacaaagcaggcgcaggcggagtaaccggcgtacagttcgccaccagccagccggcagacggatatacatatctgctttgcacacagtctccgatgttagcacagatttcaggagcaactgatttcgatgtatacgggaaaatcaaacctctgtgccagctcgtacacgactgcaatattttcgtaacaagttctaaatcaccatacagcaattacagtgagctgaaggaatatgcacaggctaacccgggcaaggttaaatgcggcgttatgacaatcacaggtctggatgctgcctgcgtggaagcagcatttgaaggcgatgtagaagcagtagcttatacagaaggttcccagttaaacgcagacgtaatcggaggccatgtggatctggcctgcgtaggaccggcagaggtttccgcaatgctggaatccggcgatatgaaggttgttatgtcctgtacggaaaagaaactgacactggccggttttgagaacgttgacagtgcaggcgacctcggactggattgcttcttcggaccttcccgtggtattttctataccgaaggaacacctgaagcagctatcaaatccttcgaagcagcagcagaaaaggcagttgcaagcgaagaattccagacatgggcaaaacagcagggtctggatcagagacagggatggttaaacacagccgattatcaggcatcatgggataacgattataaagatttaactgagatgttcggaacgaaataacagatttggaacaggggagtggagcaatccgctcccctgaatgaaaaaggcagggaaaggcaggttatctgaattggacattatcttttcaatcgtattaggaattttctgcatataccttttcttcctggtaggcgccgagtcaccagctcctacagcgacagaacttggtgcagcattctggccgagaatcattctcgtccttcttatattattaataatcgtgaatatagtaaattctctcaagaagctgaagggcagtaatgagaagctcaccgcaggctttaaccttggagaatttttaaagagtaaattatttgtgggtatgattctggtggcggttatggcgattctgatgccaatcatcggttttatcccggtaagctttctgttcctgattgcttacggcgtgcttctcggtgagagaagaatcggatttctgattattgtatctcttgttattacggctatcctctatattctgttccagggcgccctggatattatgctggcaagaggtactggaatcttccgtgatttcgcgctgttctttgaaacaaaaatgccattttaaggaaggagtataaggtatgtttgatttattactgactggtttgcaaatcgtatttacgccttctacatttttccttttagtagctggtactgttttaggcgttatttttggggcaatgcctggtgtaagcgcatccatggcagttgctctggcacttccgttcgcttatgcgatgaaccccgttattgcgattgcttttcttgtttccgtatactgtgcatccatcacaggcggcggaatcacggcaattctgttccgtataccgggaacaccgtccagtgcaccgaccacatttgacggttatccgatggcccagagaggcgaagcaggcaaagctcttggattttcactgattgcatcggctgtcggcggtcttgtagcagcatttgccatggcgctcgtatccccgcagcttgcaacggtcgctttgaaattcgggccttccgaattattcgcggtatcgttcctgggactctccgttttgtcctgtctggacagcgataatattgtaaagactctgatttccggacttttaggactccttcttgcctgtgtgggcatggatccgatgcttggtattgcacgatttacgtggggcaattccacactcctttccggtattgagatgattcctgtcatgattggtctttttgcagtcactgaagtgctgaagcagacggtgaagcctaagaaaattgacacggaaaaagatgcgaccggcagcggagccggcaagatgaagacagttcttccaagcatgaaagaggtatgggcaacaaagtttacgatgatccgttcctccgtaatcggtacggttgtaggtattcttccaggcgcaggagcgacaatcgcctctttcttatcctacgcaattgagaagaaagtttccaagcaccctgagaaactgggaaccggtatcccggacggcattgtcgcttccgaggcagccaataatgcggccacaggcggttccatggtacctctgctttccctgggtatcccgggaggcaacgcggcagcgattatgatgacggctctcgttatcaaaggcgttcaaattggccccatgcttgttaagacacagccggaatatctggcatccgtatttggctccatgcttgtaacgaatatcatcatggttatcgttgcgatggcggttgcaaaggtatttgcaaagattctttccgttccatacagcattctcggccccgttatcattatgatggctgcaatcggcgcatatgcgttgaataacaatacgggcgacgttgctcttatggccggagccggcatcatcggatacatgtttgtgaaactcggttataactcagcggcgctcgtgctcggcctcgtacttggccagatgtgtgaatccaacttccgacgcgcttacacgctgaccaacggaagcctgacccagattttcacaaaaccgattactgccgttattatgatctgctgtatcgtaatgctggtttatccttttattaaacctctgtttatcaaaaataaagcagaaggcaaatagataatgcaggcgggccgaagcccggcaaagcgctgaaatagttagaaccccggctgacgtctccctctgttgcaaaacggagggaggtcagccggggttcttaatgaattacagaaatggattttccacctcgaccagtatattgatgaaatcccgcatatatttggtcagataaagattttttctgtggcagatatagcagtggcgctggctgtccgcgtagagaatgggatagatggatgccttttcaagcatctccggcgtcttttctatgtaattcttcggacagatcatgacggcatcgcaggcgatacagacctttttttccacctcaatactgacggtttccaaaataatcttcgggtgcatatcgtttgtaatgaagagattgtcctgcacagcccttacgctgtggcccggtttgttggagacaaacttttcaccgcgcgcttctgaaatcggtatcggagtgccgtttggaatccgtttagccagttccgtgtttttggaggtgagaaggacgagatcttcattttccaccagaatatacttcagctctgtgtggcgcgcggttgtggtcatgcaggccatgtccacggttccgtccagcaccatgttctccatcagcccggaaccctgttcaaatacctccacatccacataggggtacattttaaaaaactttggaagtacatagggaagcacctgcatgcctctctgtacgggaacgccaaagcgcagttttccatgatcctcctgggtaatctcttcgatttccttggcgaggtttgtattgatggtcaggatctgctgtgctgcttccatatatttttcgcctgcgtaagtcagtgtaagcggttctgtagatcggttaaaaatcggagttcccagattggtttccaccagtttaatcatctggctcagggaaggctgtgatacatataatttttttgccgcgctggtgatactgccttcctgcaggacggtcagcatatactgggcatgcttaagattcatattttattcccccgttagtttcttagagcgttacattccgatcatatcatttctgggtgaaaatagcaatgcgtatggatatttagttaagcaggtgaggacgccgccggtacggccagcggacggggtggtggggtgtgtatatgagtctttcgtcccgggggttggcatcgctggctggagaaggagatactgtggttttgttttcgcagggcggagccggatatcattctctccttctccgccggaagatgtcggcagtatctccttctcccaaaaggttttcgccgggacgaaagactccgccaagtgtatcggccccgtccgctggcctgcggccgctgaatgtctcacgcgttaagagcggggcggaccttgtcgcggccactaagagtttccgtgaacgggaaatacgatatgctttcaatgcacctttattaaggaattgtggaagatttgatatcggcctgccggaaacacgtagtggtcgcgacagggccctccccatttaaggttggagacaatcagcgcccggagcggaccatgtccggtgtgcggaaacttccgcctgagtcttccgtccccggcgaaaacctgaccggggaagtaggcggaatcaattgcggaggggacatgggagtccgccggtgcttggcgaggtccctcacgagcttagcactgctgcgcactccaaagagtgcaaacggtccccgcagcaattcattccggccggattccccctccacgaccaacttcccacggggacggaagactcagacagactccccactacaccggacatggtccgttccggacgcgtcctccaacctcagttaaatctccatctaaattttgacacgcatttgcagctaatgtataattattacaattcgaccggaaggcattctcaggaaacagagaggtcaacagtttcctgaaaccatataaaaagggggtttgcggtttgaaagaacaatatagaaaactaattgtactctattgtacaatgtttaaaataggttgttttacatttgggggaggatggagtatcatcgcccagattgaagaagagttctgcaagaaaagggggtgggtgacggaggaacagattctggattttatgtccgtggccaaatccctgccgggtatcatgattgtcaattactccgtattattcggctatacggctgccgggatccccggcgcgctggcggcttcttttggactcgtatccccggcggtaattgtcattgcggtaatcacaaatttttacgacatattctgtaataatccttatgtgatccggatgatgaacggagttcgaagcgctgtgattcccgttattatcggagcggcctggaagctgaagaagaatgcgctgactgacagggcaacgtatctgatcgggattgcagtcaccgtcatctgtgtggtttctgatttaaataagctggctatcgtggtcctctgcggcctgattggcatagcaatgtacgtaaaggagaggacaggccgtggcagagatctatcttaaactcgtatttgcatttatccgaatcggcttttgcagcttcggaggactgacaatgattcccgtaatcctggatgaagtgacggccaatggctggatgaccgaggcccaggtgatggatgtgatggccctggccgagattacgcccggctcaatgggaatcaactgcgctacctttgtcggataccggatcgacggaatcccctgtgcgctgctcagcagcctcggcgttatggttccgtcactgacactgtgcatgctggccgcccatttcttaaaacggctgaaagggaatccttggatggaacatgcgctgtgggggatccgcccggcctgtgtcggtatgctggccgcagtggtgataacactgagcggctccacttttctaagcggggaatttatcatacggtggaacctggtcatcattgcgctgattacgggaggggcaatgtacaagttccatctttcggttccgaagacaatgctgctggcagcggttttggggctgattgccggatagagacacggcataattctgtaacagttcagactgtctgcgcatttgctgcactgaccgtgcgaaaaggcagtggcagcgagcatccggctcatcgcgcagcgatttaattagccggatgccgtaacagttcatgctgtctgaactgttacgtaattttgaaattagttgactcccctctctatttgcattataataccattatctatggacgaaagagggaactgtgatgttaaagagtatgaccggttttggccgctgcgaaattacgacagaggaatacaagatttcagtggaaatgaaagcggtgaaccaccgttatctggatctgagtattaagatgccaaaaaagttcaatttctttgaagcaggtatcagaaacctgctgaagaagtatatccagcgaggcaaggtggatctgtttatttcctatgaggattacaccgaaggccggatgtctttaaaatacaacgcttctctggcggcagaatatatggagtatttccacaggatgtcggaacagttcgcgattgagaatgacgtgcgcgtgtcggctttggccagattcccggaggttcttacaatggaacaggagccggaggatgaagaccagatgtggaagattctggaggaggctgtgagcgaggccgctgccaggttcgtagagagcagaattaaggaaggtgagaacctgaaaaccgaccttcttggcaagctggattatatgaccggtctggtggatgaaattgagaaccgtacgccggggatcatggatgaatacagaagaaagctggaagataaggtgaaagaacttctggagggttctgccgttgatgagggcaggatcgcaacggaggttacgatttttgccgacaagatctgtacggatgaagagacggtacgtctcagaagccatattgaagccacaaaggcggaactgaccgccggaggcagcgtgggaagaaaactggattttattgcccaggagatgaaccgcgaggccaacaccattctctccaaagccaatgatctggaagtgtctgataaggcaattgcgctgaagacagagatcgagaaggtcagggagcagattcagaatatagaatagcagccagcagcttttactgccgttcagataagattaacagacaaacggagacttgaatgatgaataatcagggagttttagtagtagtatccggattctcaggcgcaggcaagggaacgcttatgaaggcccttctgacaaaatatgataactatgccctgtccatttccgcgacaacccgtaatccgcgggaaggagaagaggacggaagagaatacttttttaaaacacgtgaagaatttgaacagatgatagagaacgacgagctggtggagtatgcccagtatgtcgggaattattatggaacgccgaaggcgtatgtcacctccggcatggaagctggaaaagacgttctgctggagatcgagattcagggagcgcttaaaattaagcagaaattcccggaagcggtgcttatattcgtaactccgcccagcgcagaggagcttcgccgccgtctcgtaaaaagagggacagagccggttgagacgatcaatgcaaggctctcaagagctgccaaagaggcagaaggaattgaagattatgattttctccttgtaaacgacgagattgacgaatgcgtcgacaggatgcacggcctgatacaggcaatgcatgcaagggtagggaatcatttaaacttaatcagaacaatcagagaagaaatgaaggacttttgaaaggagcctgaataattatgatgttacgtccatcctataatgatttaattaaagtggtgaacagcggtgtggagcctggtgatgagcctctgatacagagccgttattcaatcgtgattgcgacagcaaaacgcgcaagacagctgatcgcggggaggagtccgccgtaccggccgatgccagaaaaccgctttcaatcgctatcgacgagctgtaccaatccaaagttaagattatcaacgacgataatactcctgaagatgagatcgaatactaatgaagaaggccgtctcgcgctttttaagtgcaaggagatggcttttgttgattggcggtgacctgtgcgcggagcgtgcaggttatcgctgattggcggtgatttgtgcgcggaacgcgcaggttaccgctgaatgtacaaaaaattgattggagtgaaagaatgaaaatactttgtatttccctgggctgtgacaagaacctggtggatacggagatgatgcttggacttttaaataaggacggccatacatttaccgacgatgagaatgaagcagatataattctgattaatacctgctgctttataaatgatgcgaaagaggagagcgtgaatacaatcctcgagatggcggagtacaaaaaatcaggaaagtgccgggcgctgatcgtcaccggctgtatggcgcagcgctataaggaagagatcatcaaagagataccggaggtggatggaattttgggaacctccacctatgatgagatatcgaatgtactgaacaaagcgctttcaggggagcaggcagtttgtttccatgatctttcagcccttcctgaggtcagcgaaaagcggattgtcacgacggggggccattatgcgttcctgaaaatatcagagggctgtaataagcgctgtacttactgtattattccgtctctccgcggcccttaccgcagcgtgccgatggaacgtcttctgacggaagcgggacagctcgccggacagggcgtgaaggaattgatactggtggcgcaggagactacgctatacggaacggacctttacggtaaaaagatgcttcctgagctgctaagacggctggcagagataccgggcattgaatggctccgtgttcagtactgttatccggaggagattacggaggaactggttcaggtaatcaaagaggaggaaaaggtctgccattatctcgatattccgattcagcatgccagcgaccgtatcttaaaaagcatgggaaggaagaccagccgggaggagcttaaggagcggatagcccgtctcagggaggagatacccgatatcgttctgcgcaccaccctgatttccggttttcccggcgagacgccgcaggatcatgaggaactgatggaatttgtggacgagatggaattcgaccggctgggcgtatttgcctattcggctgaggaggatactccggcagcctcatttccggatcaggttccggaagaagtcagagccgagcgacgggatgaactcatggaactccagcaggatatagcctttgaaaaggcggagaacatggttggcaggattctggaagtcatgattgaaggaaaagtggcggatgagaatgcctttgtgggaagaacttatatggatgcccctggtgtggacggattaatctttgtaaatgcagacgttcccctcatgtccggcgatttttgccgggtcagggtgacaggtgcggctgactacgatttgattggagagatgatagatgaatttgccgaataaactgacgacactgcgcgtctttatgattcctttttttgtgttttttctgctttatcagggaggagaaaatacgaccttccgcatgatttcactcgttcttttcatcgtggcaagccttaccgatctgctggatggaaagattgcaagaaagtataatctggttacaaattttggaaagttcatggatcctctggccgataagcttctggtctgttccgccctgatctgcctgatcgagcttggacagcttccggcctggatggtcatcatcatcatcagccgtgaatttatcatcagcggtttcaggctggtggcttcggataacggggtcgtgatagcggccagctactgggggaaattcaagacaacatttcagatggtggcggtagtccttctgattctgaatatgccggcccttgccctcatcacaagcttctgtgtctgggtagcgctcgcattgacaattatatcactggtagattatattgctaagaactataagattcttacagaagggagcatctaaagatggttgttgaactgatttccgtggggacggaactgctgcttggtaatatcgttaatacaaatgcccgttacctctctgaaaaatgcgccatgctgggtttgtcggtatattatcagacgacggtaggcgacaacagggagagaatggctggtgtcataaagactgcgcttgacagggcagacatgattatcctgaacgggggacttggccctaccgaggatgatatcacaaaagaggtctgtgcagaggtaatgggggcccgcttggtggaagaccctacggtaaaagcccatcttgaagaatggtacaaactgaggatgaaaagcgaactgccggaaagcaattggggacaggccctggttccggaaggagctgttatttttgaaaaccacaatggcacggctccgggtcttgcagtggagaaagacggaaaaattgcaatcctgcttccaggccctccgggcgaaatgtatcccatgtttgaagagcaggtctgcccttatattcagggaaaacagtccggtatcatccgatcccagatgataaagatctgcggatttggtgaaagcaaggtggaggagatgcttctcgatctgatcgacagccagaccaatccaacgattgccacctatgcaaagacgaaagaagttcatatccgtgtcacggccagagcggagactgatgaggaagcgaagaagattttaaaacccgttgtaaaagagattaaaaaacgtttcggcaacgcagtttatactaccgatgaaaacgagacgctggaagatgttgtagtccggctgctcacaaaatacgacctgactgtcacgacggcggaatcctgcaccggaggactgctggcagggcggctggtcaatgtaccgggcgcttccgaggtattccgccagggcttcatcacctattccaataaagcgaagaggaaacagcttgacgtcagcaaaaccacactcagaaaatacggtgcggtcagcgaacagacggcaaaagagatggcaaccggcggggtttttgcaacggatgccgatatctgcattgcggttacgggcgtggcggggccggacggcggaactccggaaaaaccggtaggcttagtctatattgcatgctatatgaaggacagcgtacaggttgaggaatatcattttaacggcaacagggaaaaagtccgtgaacagacggttgtacaggcacttgacctgctcaggcgttccgtgctgagccattataaaaaggattaaaacggtagtaaaagtagggctttataagtgccaataaggagaaagactgaggggaatagaagttgggtagtgttgataaaaaaaagctgctttcggcagcacattattattcctacacaagatttacactgaatctgttcagcttgtttgaggatatggaggaagcggttccctccgcatttctgagggagtttgcggtcaggctgaccgataaagcagagaattttctcaaaggggaagaggaatgctccgcgctggaagagatgagagagcaggcgctgggcctgcttgaccgtgtctcaaattatctggactgttactgtatacacgaatatgtgatggatcgggtggaaagaaagctcttcccggaggaacccgtccgtatcgttcccgaggctctggcagactctctgatggatttcatcatggatggtgaaaacaatctggataccaacaggcgcattcagacgattgtcggcgagctgcccgtccgctttactaaaagtaaattttacagcgtaatcgaggaaagcctgaggccatacaaagggcgcgaaaaaagagatttggaacggatgattgacaagatacgcagtgcggccgcattgccgctctatgaaacaaagccggaggatgaactatcgcagatgctttttcagaacattcacagtacagccgtggagatggaaaaatgcgattatccggagcttacccgggacagctttcaagcgctcaaagaacgctttaatcaaagctatgacagcttatccaatattctgggccagttaatatgccttccggatttggtcaatgatttatatgtgctggaaaaaagccgggcttatgttatagattctccttacctggatacggcggaaaagactctgggcgccgttcttaaaagaatcatcggtggagacgattactgcgcagaggacggcggtgagatttccgcgctgtttgccccgctggaaggaaaacaggagtattactgggagcagtatctgaaggagcttggcaaatgcgcttcgccggaagaggacacggatgaggaactgttcacagtggaccggttattatccggaagcttcgccgcttcccttaagagggagccggacggcggcaaggtaacggaacaggtgttttcctcttccctggagactttattcacacaactggaaacgcgtttaaaaagaacgtgtaaagtcacatccagagcggtaatggcaaaggttctgtccgaaataccggtttggtttaattcacttgaggagatagagtcttatataaaggacagtcttgcactgtgcatggatacggcggaaaaagaagcctgcatgataaatttgaagcagataatggtggaggggaatgcgctggtataagcatctatatgtaggccaaaaagccaaaaagaaaagatttacaatcatacagaatatccgtaaaggcaggtttcaggcgggagtccatgtgataaccccggcttcatgcggggagaacctcatggatatttatccggccagcctcctccttacggaatattacagtaagaaagaggatttactgattctcggaattgctgccgattactatgaagcgctggaagtggcgcgtgacattgtagatgagatgtatcatacgacaggcaggttttccattcgggaatttctctctaataatgggcagaggtgaatggaatgctccatattttatttctaatattgaaaatagcgggattcctgctgcttgccatactggggcttatcattctgcttcttctgtctgtccttctggtccctgtcaggtaccgcggacagggatctttttatgaaaaaccggaaggtgtgttcaggataacatggcttctgcatctcttttcggttcgtgtaagttactatggagaacccgagatacagatacgtatcctcggattccgtgcatttaaagatagaggagaagaggcggaagaattcgatgacggtgagccggttcctgacgaagatgcgttttccgtcaggggagcgcatgcggatgaagaggcatatcacggtgttttgcaggacgagccggttctttctgcgcaggagataaagcgggatgaaccggaagatccgaaactgcagttttcacggcatgaggaagagagtgagcctgagaagcaggcagacatcccggtgaaggaacatctgctgcagcgtctggccgggaaagttaagagatttttccgccggctggcgcttgctttcagaaacatttgcgatgctctgaaaaaagcggataatctgagagagtctgccgcttcgtttatgcgggatgaagagaatcaaaagacgtataggctgataaaaaaacagctaaaaaaagtattgcgacatgttttgccggtaaaactaaaggggactgtcacatttgggtttgaggaaccgtatattaccggccagatccttacctgggctgcgcttctctatccgctgtatcacgataagctcattatccggcctgtatttgacaggcaggtgctggaaggcgaagtgtcactgaaaggacgcatccggacgggcactctgctgatggccgggatccgtgtattgttaaataaaaatttcaggaaacagctgaagcggttcctgaaccgaggaggaatataatatggcagataatcagttttcatcaacagtggaggcactgtttaaaggcatggataattttgtgacaaccaaaaccgtggtgggagaggccgttaagatcgacgatacgattatccttccgctggtggacgtaacctgcgcaatggcggccggagccttcagccagccgtccaagaataacggtgcaggcggtatgagcgcaaagatgagccccagtgcgattctcgtcattcagaatggcgtcacaaagttagtcaatatcaagcatcaggatgccgtcacaaaaatcatcgatatggttcctgactttgtcaaccgatttgtaggcggaaaggacgacgtgattacggaggaagctctggaaaaagtagaagcgatggcggaagaattagaaaaatagccgcatgattttaccctggccggcatataatactggtaaccggatttgtacagggaggggactgccttgaggcgtctatgcgggcttgtaatattttccataggcattggaatgatgctggtactcatttttcccaagaacttcctgtgggtctgtgcagccatttcatgcctgataatcggatataatttgttctgcggctgttaaagcccggaagaatgtcaatacagagacgctaacctgtacgcggagcatgcaggttagcgtcttcaattaagaaagaatcgcgctcgcgggattctccgcctgcggcgggtcgcttcggcgagtgtaacgagcttagtgaacaagccctctttagagttgcgctcctccgcgagcgttttttatttaacaggagagatttcctgttaaataaaagacagccccgggcaaatgccaggggcttcactgttcaacggttaaaatttgcagaacttacaattccttgtgtctatcacaattaagctctttcaactaagccggatcttaagcaagaagtacatacgtacatcttctgagctccgccgttagtttttaccttaacagacttaacgttagctttccacatcttgttagatcttctatgtgagtggcttactgcattaccgaagtgagcagctttttcacagattgcacatttagccattattgcacctccttaaccgaacgaattggacttcctattaaaaatccataacaaatgtataatagcagaaagaagggaattttgcaagtgaaatttaaaaatttgtttcttttttcatgaaaataaggtataataatcgcagagcgattgttataattcagttcccggcagggatatgagataatcatcaatataaatagaaagaaacggaggctgtgagatatgaaaggtcgcattaataataaatttggttcgatacagatcgacccggaagtaatcgccatgtatgccggcacgactgccgttgaatgctttggaattgtcggaatggctgcggtcagtatgaaggacgggctggtaaagctgcttaagagggacagtcttacccatgggattaacgtttccatcaaagaaaatatgatcagtattgacttccatgtcattgtcagctatggtgtaagtatttccacggtcgcagacaatctgatagagaatgtaaaatataaggttgaagagtttaccggaatggcggttgaaaaaatcaacatctttgttgaaggcgtaagagtgatagattaaggaggaaactacctgtgggtatgaactatattgacgccgagatgcttaaaaaagcatttctggccggagcgaaaggccttgaggccaataaagaatggattaatgagctgaatgtatttcccgtaccggacggcgatacgggaaccaatatgacgatgacgatactttcagcggccagagaggttgcggcaatcgaaaatccgacaatggaatctctcgccaaggcgatttcatccggttctttaagaggagccagaggtaactcaggtgtgattctttcccagttgttccgcggctttacgaaagagataaagacggtggacgttatcacgacaacgacccttgccaatgcgtttaaccggggaacggagactgcgtacaaagctgttatgaaaccgaaggagggtacgatccttacggttgccaagggaatggccgataaagcatcggagcttgtctcacagacagaggacatcatcgaatttgcacgaaaggtaatcgagcacggcgattatgttctgagccagacaccggagatgctgccgattctcaaagaagcaggcgtagtggattccggcggccagggactgatgcaggtcttaaaaggctgtctggacgggctgaccggaaaggaaatggatctgtcggtggaaggcgccaggacacaggcaccgcttcagactgcaccgcctgccgaagaatttgacattaagtttggctactgcaccgaatttatcataaatctggaaaaagaatataaccagaagtcggaacttgaattcaaaggatacctggaatcgatcggtgattccattgtcgttgtatctgatgatgatatggtcaaagtacatgttcatacgaatgatccgggactggctatccagaaggctcttacctttggttcgctctccaggatgaagatcgacaatatgagggaggaacatcaggagagactgattaaggatgccgaaaagctggcgaagcagcagaaagaaaaagaggccatggagccaaggaaggcatacggatttattgcagtctccatcggagatgggatgagcgaaattttcaggggaatcggtgcggactacctgattgagggcggacagacgatgaacccaagcactgaggacatgctgaatgctatcgactgcgttaatgccgatactatctatatccttccgaataataagaatatcattctggccgcagagcaggcaagaagcctcgtaaaagataaaaagattattgtggttccatccaagacggtgccgcagggaattacggcaattattaattttgcaccggatctgccgtggaaagagaatctggagctgatgatccaggagatgggtcgtgtaaagagcgggcagattacctatgcagtcaggaacacctccatcgacgggatggagataaccgaaggagatatcatgggaatcggtgacagcggcatgctggctgtcggtaaggatgtggaatcgacggctcttaaaacactccgggccatggtagatgatgaatccgaactgatttccatctactatggagaagatgtgaaggagagcgaggccgaagcgttctatgaaaaagcacaggaggcattttccggctgtgagatcgagcttcataacggcggacagccgatctactactatatgatttcggtggaataggaatatccgttacacagaggcagaccaaagaaaaaagcggcggtttgcctctgcttttttctttgcagaagtttataaattgtaaaaggttaaattgatgaaaaatgagaattttaaaaacatagtgccgggtatcgctgaaaggcctgttacatcgctgaaaggaatcggtgacaagacggccgggctgttcgccaggctgggggtgcagactgtggaagatttgctccattactatccccgggcctacgataccttccgtgagccgcagccgatctcagagcttctcccggagacaatggccgccgtatccggtatgctgaccaagacggcggacgttgtaaaattcggccatctccaggtgaccaccgtgactgtccgcgacatcagcggaattctgacgctgacatggtataatatgccgtatctgagggggaccctgaaggcgggggagcatttcattttccggggacggcttgtcagaaaaaggggacggctgacgatggagcagccggagatttaccggccggaagcctatgcgcgtctggtgcactccatgcagccggtttacggccagacaaagggcctgggaaacaaaacaattgccaggacagtggcggaagccctcgaggttaaggagacggagaaagattacctccccgccgccctgagggaaaaataccagcttgccgaatataattttgctttggaacatattcactttccgaaggatgagacggagcttcttttttcaaggaaaagactggtattcgacgaatttttcatgtttctgctttccgtccggcttctgaaggataagaaagtggacaaggcgagtccctgtccgttcaaaattgataatcagatccgcgggctggaacagaggcttccgtattccctgaccaatgcgcagaaaaaagttctggatgaggtataccgcgatttgtcgggggccatatcatgaaccgcctgattcagggggatgtaggttccggcaagacaattattgcagtcctggcccttctccaggcggccggaaacggctaccagggcgctttaatggttccgacggaggttttggccagacagcattttgaatcgatgaatgagctgtttacgggccttgggctgtctgccagacctgtccttctgaccggttccatgacagccaaagaaaagaggctggcctacgaaaggattgcaaaccatgaggcagacattattgtagggacacatgccctgatacaggagaaagtgatctatgacaagctggccctggtcattaccgacgaacagcaccgttttggcgtgggtcagagggagatgcttggtaataaaggaatggagccgcatattctggtcatgagcgccacgccgattccgcgtaccctggccatcattatttatggagatttagatatttccgttatagacgagcttcccgccaaccgacagccgattaagaattgtgtcgtgggcagggattaccgcgaaaatgcctaccgttttatagaaaaagaggtaaaggagggacggcaggcctatgtcatctgtccgatggtggaggcgagcgagatgctggaggcggagaatgtcgtcgattacacgaaaaccctcagggaacacctgtccggtgatatacgggtcgaatatctgcacggaaagatgaaggcgaaagaaaagaacaggctcatggagctttttgccgccaatgaaatccaggtccttgtctccactacggtcattgaagtcggaattaacgtgccgaatgcaacggtcatgatgatagaaaattcggagcgttttggacttgcccagcttcaccagctccgcggccgtgtgggccgtggaaaggcccaatcctactgtattatggtaaactgctccggtgaggaggacgcgcagaagcggcttgagattttaaataaatcaaatgacggctttttcattgcttccgaagatttaaagctcagagggccgggcgatttattcggcgtacgccagagcggcgatctggaattcaggctggccgatatttttacagatgccgatattctgaagacggtttccgaggaggtaaaaatgctgatggatcaagatccccttctgtcgagcggagagaaccgggaattgaagagaaagctggatgactatctggagagaagctatgaaaaactgaatttgtaagtaaaggaggatattatgctgcggctgagaccctataaaccggcagatgccggatatctgatgaaatggcttgaagatgagcgcaccgtggaattctggaaggcagaccggttttgctggccgctgacggcggagcagcttgccgattactgcgaagactttacagcggatccggctgccgctgcctttaccgcactggatggcgccggaaatccggccggccacttttccttccggcagatcgactgggccgggaaccgggcccacatgggctttattatcgtagatcccggctgcagagggaagggctatggaagggagatggtccggctggcgctgcagtatgcccggctgtgccttggccttgactttgtcactctgggcgtgtatgactgcaatgagccggcgcgccgtttatatgaggcggagggctttgtaaaagcagaccggctgggagaaaaacagaccggctttcgcggtgaaacatggacctattattacatggaagccgatctgaggagcacataaagcagaaggctccgttacagtaacagttcatgctgtctgaactgttacccgttacatgtgaaatatgactgcttccgattcaggaactgtccggacctggaatgggttccggcagttccttttctgttgaaggcggtgacccgtgagcgaagcatgcaggctatcgttattccttattttgttgtttttcattgccagaacctatatcttgtggtatattattacagtagacaactaataacagttattaatactgatatttagctgtctttgattcttccccggataactgcttatccggttgggagaataatttcattgatacttcaaaaaataagcgtaagagtccacagggggtaaataatggataatctaaaagataccggcgccggaaaaacagccggatcgcaggtgagcctgcagagcctggagcatttaacccgggagattccggagctggcacctgccctggaggaaatagaggcgaggtggccgaaggaggaatattccccggagcttctggctcataagttttctgcttttgtaaaaaagaatatggaaccggaggaagcgttatccctgctgattcaggcagcggcagaactgacgcgaaaggaagcgccggactgggagtatattgccgcgtaccttctcctggtgcgttttcggataaacctgagggaagaggataagaagcacgggatcggcagcttctatgacaggatccgctatctgacccgggaaaatctttacggcagctatattatggaatattacagcagagaagagctagaggaagcgggcggcctgatcgacgagaagcgggatctgcttttcaattatgcaggccttgatcttctattatccagatatgtaatacggagccgccaaaacataccgcttgaatcgcctcaggagatgtttctggggatttcgctccacctagcgatgaaggaacaaaaagaccgtatgaaatgggttaaacggttctacgatatgctgagtacgctgaaggtcacgatggctaccccgacgctttccaatgcgcgaaaaccttaccatcagctttcatcctgcttcatcgatacggtgccggacagccttgacgggatttaccgcagtatagacagctttgccaaagtcagcaaattcggtggcggtatgggtctctatttcggcaaggtgcgggcatccggcagttcgatccgcggtttcaaaggagcggccggaggcgtaatacgatggattaagctggccaatgacacggcagtggcagtagatcagctcggcgtgcgacagggggccgtagccgtttatctggacgtatggcataaagatcttcccgaatttctggcgctgcggaccaataacggcgatgaccgtatgaaggcacacgacgtttttccggccgtatgttatcccgacctgttctggagactggcagacgaggcaatcgattccgactggtacctgatgtgccctcatgagattctggcggcgaccggttatgccctggaagattattacggacaggaatgggaaaaacgttattgggactgtgtgaaggatgagcggatcccgaaacgggtgctgccaatcaaagatatcatccggctgattttaaaaagcgcagtggagaccggaacaccgtttaccttcaaccgggatacggttaaccgggccaacccgaaccgtcaccgcggtatgatttactgcagtaatctgtgtacggagattgcacagaatatgagtccggtggaagcggtggagcagaggattgagacggtggatggagaaaccgtcgttgtgactgtgacaaagccgggagattttgtggtatgcaatctggcaagcctttccctggggaaaattaatgtgtcggaccgcagtgaactcacttttcttgtacgctgtgcggtccgggcgctcgataatgtgattgatctgaatttttttccggtgccttatgcgaaaattaacaatctgcggtaccggcctgtcggtcttggcgtcagcggttatcatcatatgctggcgaaaaacggtatttcctgggaatcggaggaacatctggccattgcggatcgtgtgtttgagtggatcaactatgccgcaattgaggcaagctgcgattatgctgaggaaaaaggctgctacgaatactttccgggaagcggctggcagaccggcagttactttgaaatgcgtggatattgttcggatgagtggcgccgtctgagagaaaaggcagccgccgtgggactccggaacggctggctgattgccgcggctcccaccagcagtaccagcatgatttcaggcacgacggccgggctggatccgattatgaaccgcttctatctggaagaaaaaaagaacggcctcgttccgcgcgttgcgccggagcttacgccgtctacttactggcggtataaaaatgcccattatatagaccagaaatggtccctgagagcagcgggtatccgccagcgccacattgatcaggcgcagagtatcaatctttatattaccaacaattatacgctgcggcaggtgctggagctctatcttctggcatggaaaagcggggtgaagaccatttattatatacgttcaaaaagcctggagattgaagagtgtgaagtctgttccagctagaacgtttctgacgggcagtaacggaagcgggatatacaggcagcggaacagaacacagtaataggagagaggtaaattcaaattggaagaactgaaacgcaaattgttatttaatccggacggggacaccgatctgcaaagccgccgtatgattaatggcaataccaccaacctgaatgattttaacaacatgaaatatacctgggtcagcggctggtaccggcaggccatgaacaatttctgggtgccggaggagataaaccttggaactgatgtaaaggattatccgctgctgactgtgggggagcggcgggcctacgacaaaatattgtccttcctcgtctttctggacagcatacagacggccaatctgccggccatcggcgagtatatcacagccaatgaaatcaacctgtgcctgtctatccagatatttcaggaagcggttcacagccagagctacagctatatgttagatacaatctgtgaaccgcagaccaggaacgaggttctgtaccagtggaaaaatgacggacacctactggccagaaataccttcatcggaggcctgtacaatgaattccagaaggataagactccctttgcctttgtgaagactttgatagccaactatatactggaagggatttatttttacagcggttttatgtttttttacaatctcggacggaaccacaaaatgcccggctccgcccaggagatccgctatatcaaccgggatgaaaatactcatctttggctgttcggaagtattatccgggaactgcagacagaagagccgtcgcttttttcccgggagaagacagattgttaccgtgagatgatacgggaaggctgcgaacaggagatagcctggggctgctatgccatcggcgatgaagtgcccggacttacaaaacagatgattacggattatatccgctatctgggaaacctgcgctgctctaatctgggatttgagcctctctatgacggatatgcgcatgagcctgaaacgatggcctgggtcagccagtacagcaatgcaaacatgatcaagaccgacttttttgaggccagaagcacggcatatgcaaaaagcagcgctttggtggacgatctgtagtgctcatgtacgagcgcaccgaagcgatggagaaaccggcagccctatatgcagaaagccggagtccgtacataccaaatcggtatggaacgaactccggctttctgccgccccggcttatactaatgttttaaaatactgaaacccgtccgcattctcattatacctgcggatcagcttctgaatcttcgcagtcggagtcagtgcattctcaagcgatacgttgtggttcagggagttgataatagcggcaatgaacttgctcatatcggcttccacataccattcacgctctaaaagctctttcgtgcggtaattcaggtttgtcgtaactacacagtcaatatattccttagcataaaattcatcaaatttgtcaagtccgttggtgaaaagtccgaatgtcgtacataccacgacgcgctcggcctttctctccttcagggctttggcggtatccagcatgctctcgccggaggaaatcatatcgtcgatgatgagaactgtcttgccttccacggaggaaccgaggaattcatgggccacaatcgggttgcgtccgttcacgatacgggagtagtctcggcgtttgtagaacatacccatatctacgcccaggttgttggccagatatacggcgcggctcatcgctccctcatcggggctgattaccatcaggtgatccttgtcaatcttcagtgtcttatcatgggcgaagagggccttgataaactgataagtcggcataaaattatcaaatccgtttaacgggattgcattctggactctcggatcgtgggcatcgaaggtaatgatgttgctgacacccatctggatcagctcttccagcatcatcgcacagtctaatgattcacggctggttctcttatgctgtctgccctcatataaaaagggcataataacattaacgcggtgtgcggtggcaaccgtggcgccgatgatcctctttaaatcctgaaagtgatcatccggtgacatatggttcgtaaaaccgctcattttataagtaaggctgtagttggtgacatccaccattgcgtagatatcggtaccacggacagactcatagacagctccttttccctcgccgctgccaaaccgcgggcaggcacagtttaacagataggaatctgcatcgtagccacggtattgaaggttctcctgcctttttttcagaatctcaatatcgttgtggcggaagttaagaatatgttcatttactttaccggccaattccttacagctttccaaagcggcgatttttaaaggcgccaccggaagggtgtcattaaaaacatagtcattagacatgatgattgctcctccataaataagacaggaattcctgcctgacttttatacagtttttttataccattataagacaagaatcgtcaatagaaaaacaggaagttttaacaaaaagacaaaaactttacaaaattctgtaatgttgttatgataatgaatagagaaagaaagacgaaacagttcatgctgtcgaaccaatgttgtttagttaagcaggtgaggacgccgccggtacggccagcggacggggtggtgggatagttttatgagtctttcgtcccggggaggattgctgtggtttggggctgcgggcgaagataaagtctgcggagcacgctcccgctctgtgaaatgcatcgcgctgctaagctcgagagaacctcgctaatcagcgatggatttcaacggcatccgcagactttatcttcccctccgccccaagggaaggttcaccgggacgaaagactccgccgggtgtattggccccgtccactggcctgcggccgctgattgtctcacgcgttaagtgcgggggcggaccttgtcgcggccactcatcacttccgtgtgcgggaaatacgataagccttcaatgcgcctttattaaaaaatagtggaagatttgatatcagtcagtcggaaatacgtagtggctgcgacagggtcctccccatttaaggttagagacaatcagcatccggagcggaccggggccggtgtgcgaaagccttcgccagagtcttccgtccccggcgataacctggaccggggaagtaggcggaatcaattgcggaggggacatgggagtccgccggtgcttagcgaggtcccttacgagcttagcaccgatgcgcactccaaaaagtgcaaacggtccccgcagcaattcattgcggccggattccccctccacgaccaacctccaaccggggacggaagactcagccagagcccctcaccacaccggccccgatccgctccggacgcgtcctccacacctcagttaaatctccataatgttaactaaacgacattgctatctgaactgttacagaaaggcagaattaagtatgataaaacacggacatctgatcagcagggtcgatcccggctctatcgcggaggagcttgaactggaacctggcgatatgcttctgaccatagacggcgatgaaatcgaagatatttttgattatgaatatagaattgacaatgaggccattaccatggtcgtcagaaagaaaaatggggaagagtgggaactggatattgaaaacgaataccaggatctgggcctgacctttgagaatgggttgatgagcgattaccgctcctgcagaaataagtgtattttctgctttatcgaccagatgcctccgggaatgagggaaaccctctatttcaaggatgacgattccagactttccttccttcagggtaattatatcacgctgaccaacatgaaggataaggatattgaccggattatcaagtacaggctggcaccgattaacatatccgtccaaagcacaaatccggagctgcggtgcctgatgctgcacaaccgcttcgcaggtgacgccctgaaaaagattgacacgctctatgaggcggagattccgatgaacggccagatcgttctctgcaagaatgtaaatgataaagaagagctggagcgctctatccgggatctctcccggtacgccccctgtatggcaagcgtgtccgtggttcccgttggactgtcgaaattccgtgaaggtctgtatccgcttgagccgttcaccaaagaggacgccgaagagaatctggatatcattgaaaaatggcagaaaattatttatgaaaagcatgggatccattttgtccatgccagcgatgagctgtatatgctggccggccggccgctgccggaggaggagcgctatgacggttatatccagctggaaaacggggtggggatgatacgcctcatgacttccgaggtggaggaggtcctgaaaacggcggacgacgacggaaaagaggaagagctgtcgatggcgaccggcgttcttgcttatccttatattaaggaatacctggagagaattactggtatctatccgggacggaaagtgcatctttataagattgaaaaccactttttcggggagcggataacggtggccggcctgataaccggaaccgacctgatagaccagctgagagggaaagagcttggagaacgtctgctcctgccctgcgccatgttccggaacggggaagaggtttttctcgacgatgtgacgaaaagcgatgtacaaaaagctttacaagtccgggtggatattgtaaaatcaagcggatatgattttgtagatgctgtgctggggccggtagaagagacgaaggctgagcacggagcatatgaattaatgtaacagttcatgctgatttaactgctatgaattaattggaacggaggagtaatataattatgaataaaaagaaaccggttgttgccgtcgtggggcgtccgaatgtgggaaaatccacgttatttaacgtcctggcaggcgacatgatttcaatagtaaaagatactccgggtgtaacgagagaccggatctatgccgactgtacctggcttgacaaggcgtttaccctgattgacacaggaggtattgagcccgacacgaaggatgtgatcctggcccagatgcgcgaacaggccgagatagccattgcgacggcagatgtaattatttttattgtggatgtaaggcaggggctgactgattccgattcaaaggtggccgacatgctgcgcaaatcgaaaaagccggtggtgctggccgtcaacaaggtggacagcttccagaaattcggcaatgacgtctatgaattctataatctgggaatcggtgatccggttggaatatcggcagcttcccggctggggctgggcgagcttttagatgcggtcgtaagccattttgaggacggaacaggcgaagaagaggaagacgagcgtccgagaattgccattgtgggcaagccgaatgtcggaaagtcctccatcataaataagctgctgggggaaaacagggtaatcgtatccgatattgcaggcactaccagggatgctgtggatacggagattatccataacggaacggaatatgtcttcatcgatacggcgggactgcgcagaaagagcaagattaaagaagaacttgagcgctacagcatcatcagaaccgttacggcagtggagcgtgccgatgtggtgctggtggtcattgatgccgttgagggtgtgacggagcaggatgccaagattgccgggattgcccatgaaagaggaaagggcatcattatcgttgtaaataaatgggatgccatcgagaagacggataaaaccatttatgaatacaccaataagataaagatgaccctgtcttttatcccatatgccgagtttatctttatttcggctgccacaggacagagaatcaacaaactttatgagattatcgatatggtcagggagaaccagacgctgcgcattgccaccggcgtgctgaatgagattatgacggaggcggtagcccttcagcagccaccgtccgataaaggcaagaggctgaagctctactatattacgcaggtctcggtgaaaccgccgacctttgtaatctttgtaaatgataaagaactgatgcatttttcatacaccagatacctggaaaacagaatccgcgatgcgttcggcttccggggaacttctctcaagttcttagtccgtgaaaggaagggaaaggagcagtaggtatggaacggcttatttgtgttgcaatcggttatgcattcggcctgattcagtccggctatctgtatgggaggattaaccatatcgatatccgccagcatgggagcggcaatgccggttccactaatgtgctgcgcgttatgggaacaaaggccggtgcggtagtattcctcggcgactttttcaaagcggttgctgcgatatgccttgtccgcgtactctttgcctcaggctcagacagcgtggatctgcttgccctgtatgcaggactgggcgttacgctgggacataacttcccgttctacctccgctttaaaggcggcaaggggatcgcctgcatggcagggattatgacggcgatggatttcaggattaccctcacctgcttcgtggtttttgccgtcgtggtggctgtgaccagatatgtgtctctcggatccattttggtatccataacctttttcgcggaactgattattttcggcaggatgggaagctacagggtagccgccctcagcctgcctgagttttacatactgggcggcgtcctgatgggaatggcagtctggcgccaccgggccaatattggacgcctgttgtccggaacagaaaacaaactgggagcatcgaaaaaatagcggaggattatattatggctgcaattggtgtgattggatcaggaacgtgggggacagctctgtccctgcttctttgtaagaatggctgcgaggtaacggtatggtctgccattgaagaagagataacggaaatgaaagagaagaggaggcataagaacctgcccgaagtagtgctgccggaggaactcaggctgacagcagatttgaaggaagccatggcggagaaggatattctcgtgcttgccgttccttccgtttatataagagcgacggcggcccggatgaaggagtttatccgatacggccagatagtaatcaatgtatccaaaggaatcgaggagagcagcttaaaaaccatgtctcaggtaattgaggaagagcttccggaggcagaggtggccgtcctttcagggccgagccatgccgaggaggtaagccgcggaatccctaccacctgtgtggcgggagctcaccggaaaaaggtggccgattacatccagtccgtctttatgagcccagtattccgtgtctatacaagtcccgacatgctgggaattgaagtgggagcagccttgaagaatgtaatagcccttgccgcaggcattgccgacggcctcggttacggagataatacaaaggcagccttaatcacaaggggaattgcagagcttacaaggcttggcgtcaggatgggcggtaaagaacagacctttgtaggactctccggaatcggcgatttgattgttacctgcgccagcatgcacagccgcaacagaagagccggtatcctgattggaaaaggatataccatggaagaagccatgaacgaggttcagatggtggtggagggggtttattccgccaaagccggcatgaagctggctgaggcttatggaatcgacatgccgattgtggagcaggtcaatcaggtgctttttgacggaaaaccggcgaaagaggcagtaaacgatctgatgctgcgtgaccgtagaatcgaaagcagcggccttccctgggaatcataaaaaagacaaaaagaaccgtttgtcttcctgatgacatcaagcgttcgcaagcgggagacaaaacggctcttttttgtcctttctatgaactgaggagatggcaactataacgacaagttatggcaagaaggaaattgaacggaaaaatgaagtttttctttcgatttccttttttttatgaggtttttgtattgacaattcaaattgttaaacttataatgtcgtcaatcaatccgttagcatgccatttgaaaatacctgaaaaatacggtgctgacagaagaattggaggagaagattatgaaaaaaagattactgagtttaggccttgcggtggctatggccgcatccctgactgcctgcggaagctcaggcggttctgcagagacgaaagctccggctggagagactaaggctgctgatgcagcaggtacagagacaaaagccgcagaagaagcagcagaatcagccggaggcgtatttaagattggcggaatcggaccgttaaccggaccggctgcagcttatggaattgccgttaagaacggaatggaactggctgccaaggagattaacgctgccggaggtattaacggtgcgcagattgaatacaacttccaggatgatgagcatgaccctgagaaagcaataaacgcttacaatacattaaaagactgggatatgcagatgcttttaggtacggttacatccaaaccatgtatcgcagttgttgctgagtctcaggttgataatattttccagattacaccgtccggttctgccgttgagtgtatttcaggggataatgcgttccgtgtatgcttctctgatccggatcagggtaaagcttccgcacagtacataggcgagcacaaacttgctaccaaaatcgcaattatttatgacagctctacagagtattccgacggtatccgtgagtccttcgtagcggaggccgccaaccagggacttgagatcgttgccagtgaagcattcacggcagacagcaacaccgatttctccgtacagcttgacaaggcaaaagaggccggagcagagcttgtattccttccgatttactaccaggaagcttccgttatcttaaaacaggcttctgataaagagttcagcccgatcttcttcggatgtgacggtatggatggtatcttaagtgttgaaaacttcgatacatctttagcagaaggattaatgcttttaacacctttctctgttgacgaggaaggcagcaaggattttgttgaagcttacagggctgcatataatgaagagcctcttcagttcgcggcaggcgcttacgacggcatgtatgccatcaaggcagcagcagaaaaatccggtattacacctgatatgagtgcatccgacatctgtgacgcaatgaaggcagccatgacggaaatcacgattgacggtttaaccggtacgggaatgacatggacggcggcaggagagccgaacaaggcaccgaaggctgttaagattgaaaacggcgtatatgtaatccagtaataaagcaatatagaattagcccttaaagagggttgtccgaaagacaaccctctttttaactattaatataccaaataaagacaaagaggtaggtgtaagcggtatgagttttctttcttatttaatcaacgggatcagtcttggaagtgtatatgctatcattgcccttggttacaccatggtttacggaattgcaaagatgctgaatttcgcccatggtgacattattatggtcggcggttttaccgtatttacgatcgtaagtacggcaggggggtcaccggtcgtcggggttctggcctcgattgtagtatgtacggttctgggcgttacgattgagaaggtcgcttaccggcctctgcgcggggcctctccgctggccgttctgatcacggctatcggcgtcagctatctgctgcagaatgtcgccctgttaatattcggttccaatgcaagacagttcacttcggtcgtaactctgccggcgctcaaactggccggcggcaagctgtccatttccggtgtaacgattgtaacaattattacctgcgtgataatcatgctggctctgactacatttatcaacaagacaaaaatcggccaggcgatgctggccgtttcagaagataagggtgcagccactctgatgggcatcaatgtaaacggtacgattgccgttacctttgccatcggttcctccctggctgcgattgcgggcgtgcttctctgttccgcttatccgtccctgacaccatacacaggctccatgccgggtatcaaagcattcgtagcggctgttttcggcggtatcggctcgattccgggagccatgatcggcggaatcctgctcggagtaatcgaaaatctggcgaaagcctatatctcttcccagctggctgatgccatcgtgttctccgtactgattatcgtgttactggtacgtccgaccggcatccttggtaagaagatcaacgagaaagtgtaggtgaataggatgaaatcatataaaaataaaatcttgattcagaatactatcacttatgcactggtgatagcggccttccttctgattcagatcctgatggccgggggccatataaacagtcttttaaagggaattctcgttccgctctgcacctatgtcatacttgccgtatccctgaacctgacggtgggaatcctcggggagctgagcctgggacacgccggttttatgtgtgtgggagccttttccggggcattttttacccatgttatggcagcctccattcccaacccgcagctccgctttattatcgctctctttgtcggtgcggtcgtagcggcggcgttcggcatcctgatcggtattccggtgcttcgtctgaaaggagattaccttgctatcgtaactctggcttttggtgagattattaaaaacgtgattaacgtgctctatgttggcacggacgcctcgggtatccatatctcaaccaaggatgtggcttccttaaacctggctgaaggcggcaaggtcatcatcaagggcgcccagggtatcaccggaacgccgaagatggcaacctttacgattggcttcattctggtgctgatcaccctttttattgtcctgaatatgattaattccagaaccggacgcgccatcatggcaatccgcgacaaccgtatcgcggcagagtccatcggaattaatatcacaaaatacaaattgctggcattttccgtatcagctgccctggccggcgtggcgggcgtactctatgcccataacctggcaacacttgccgcaacgcccaaaagcttcggctataatatgtcgattatgattctggtattcgtcgttctcggcggcatcgggaatatccgcggctccgttattgcggcggtcatcctgaccctgcttccggaaatgctgcgcggtctcaacaattaccgtatgctgatttatgccattgtgctgatcgtgatgatgcttctcacggcaagccccaaggcgattcagattcgcgaaagatggatttcttccatcaggaaaccaaagacaaaggaggaggcgtaggttatggcaatgctggaagttaaaaacttgagtatctccttcggcggcctgaaagcagttgatgactttaatgttatgattgaaaaagggcagctctatggactgattgggcctaacggagccggtaaaacaacgatttttaatctgctgacaggggtttataaaccggactgcggccagattaccctggatggaatgaatataacaggccggaaaacggccgatatcaataaagccggagtagccaggacgtttcagaatatccgtcttttcaaggaactgagcgttcttgataacgtaaaggtggggcttcacaaccactacaagtattccaccctgtcgggaatttttcgtcttcccgcttatcacaaggtggaaaaacagatggatgagagggcaatggagcttttaaaagtttttgatatggatcaggaatttgactgcaaggcttcaaatctaccttacggaaagcagcggaagctggagattgcgagggcgctggcaacggagccgaagctccttctcctggatgaacctgcggccggcatgaaccccaatgagacggcggagctgatgaacacgatccgctttgtcagggataattttgatatgacgattctcctgattgaacacgatatgaaactggtatccggaatctgtgagcgcctgaccgtgctgaacttcggccatatgctggcggaaggccccacaggcgaagtgctgaataatccgcaggtaattgcggcatatctgggagaatagggaggaagtcttatggcaatgctggaagttaaggatttaagtgtatattatggcgtcatacaggccctgaaagggatttccttcgaggttaacgagggagatgtaatcgccctgattggagcgaacggagccggtaaaacgaccaccctccatactatcacaggactgattccatctaaatcgggcagtatcacgttcgaggggaaagacattacaaaggtaccgggctataagctggtgccgatggggattgcccatgtgccggaggggaggcgtgtatttgcacagctctccgttctgcagaacctgaaaatgggcgcttatacgcgaaatgacaagcaggagattgaagatactctgacaaagatttataagcgcttcccaaggctggaggaaagaaagaaccagctggccggaacgctttcaggcggtgaacagcagatgctggccatgggccgggccttaatgtcccatccccgcctgattgtaatggatgagccgtcgatgggcctttcccccatctatgtgaatgagatcttcgatattatcaaggagatcaacgcagacggcaccaccgtacttctggtggagcagaatgcgaaaaaggcgctgtcaatcgccaacaaggcttatgtgctggagacaggaaagattgtgctgaagggcgacgccaaagagcttatgaatgatgactcggtgaagaaggcttatctgagcgagtaggaatataggatttgtcagacagtctggcaatatgaaggcaggagagagactcacgtggttacgatatcattaccgcatgaatttctctcctgctttttaaaataattgtcagaaaaaagaaaggtatggacatacctcttcgccaatattttttagcatacgccccttcccccttgcatatacttgtatcagcatagccaagggggtatttttatggacaattttaacgtatacagtgacattaaggccagaacgaacggggaaatctacgtaggcatcgtaggtcctgtcagaaccggcaaatctacctttatcaagcgcttcatggaactgatggtgctgccgggcatggacgatccgcatgcaagggagcgcacaagggatgaactgccccaaagctccgccgggaaaaccataatgacgacagagccgaaattcatccccaaggaggcggcccagatcgcgctcagcgacggcgttgacgtcaaggtcaggctcattgactgtgtcggtttcatggtggaaggcgctgccggccatattgaaaatgatacggaacgccttgtgaagactccctggttcgatgcggagattccgtttaccgaggcggcggagatcggcacaaggaaggttatcaatgaccactccaccatcggtctcgtcatcacgacggacggttccttcggagacattaagcggggaaattacatagcggcggaagagaagacgatcaaagagcttaagaacctgaaaaagccgttcctggtgcttttaaactccatgaggccttattccgatgaaacaagggaactggcaaagcagatggaggaaaaatacggggttcaggttatgcctgtcaactgcgaacagctcaaaaaagaagacattaaggcgatcctggaagagattctgcatgaattcccggttacggagattgacttcaccattcccaaatggatggaaattctcccgcgtgaacactggcttaagagccgggtgatccagaccgtcaaggaaatgctcaaaaagacggatcatatgcgcgatgcccaggaggcgcttccggaagaggataaggaagccgtcagaagaattaaaatcacagggatgaagatggccgacggcagcatccaggcccaaatcgaggtggatgacagccattactaccagattttaagcgaatatgtcggcgtcccgatcgaggggaatatcagcttatgcagactttaaagagcctagcctcgatgcagaaggagtatgagaaggtgagcaatgccgtatgccaggtgcgccttaagggctacggagtcgttacgcccgaccgctcggaaattgtgctggatgagccgcagctaatccgccacggcaacaaatacggtgtgaagatgaaagctcaggcgccgtccatcaacctgataaaggcccatattgagacggagatagcgcctatcgtgggaagcgaacagcaggccgaggatttgatcacttacataaaagaaaatgcaggacagagcgaagagggcatctggagcaccaatattttcggaaaatccattgagcagattgtggatgacggaattcaggcgaagatttcccagatgacggaggactgccagatgaaattacaggatacactgcaaaaaattattaatgacagtaacggcggtatgatttgcattattatctgatatcgggtatacttaaaccatcagttttggcaaaaataaatacagtacaggagatggttaaatgagattaacttttatcggtgcggatcacgaggtaacgggaagctgtcatttattgcaggcatgcggtcttaatatcctggtagactgcggtatggaacagggaattaacaaattcgagaatgcagagcttcccatcagttactccgatgtggactatgtgcttgtgactcactcccatattgatcacgtgggaatgctgccatttatttatgcaaggggattcaggggccaggtgatgggtaccagggccacctgtgatctctgtgagattatgctcagggactgtgcccacattcaggagacagaggcggagtggaagaacagaaaggcaaaacgtgcaggtaaatcggaagtgcctccgctctatacgatgaacgatgccaatggagtgctggagcattttgtgccctgcaattacgaccagattattaaactgaaggaaggctttgagatacgttttaccgatgtaggccatcttctggggtctgcctccatagaaatctggatgacggaagaggactgttcgaagaaaatcgtcttttccggcgatatcggcaataaaaacaaacctctcatcagaagcccgcagtacattcatcaggctgactatgtggttatggagagcacttacggcgatcggttccataagcataccggcgatcacgtggaggaatttgcaaaagttatcgaggagacgctggaccgcggcggtaacgtggtgattcccgcctttgcagtcggccgtacccaggaggtcctcaactatatcagggaaatcaaggaaaaacatcttgtaaagggccatgacaatttccctgtctacctcgacagccctatggcggtggaagcaacggcagtctttaaggaaaacatgatggactgttataatgacgagacaaaagccctgattaagaagggcatcaacccgatttccttccccggcctgcgtctctccgttacaagcgacgattccattgccatcaactttgacgaagagccgaaggtaattatctcggccgcaggcatgtgtgatgccggacgtgtcagacaccatctgaagcataatctctggagaccggaatgcaccattctctttgccggatatcaggcggtaggcacactgggccgcagtattgtcgagggaagagaagaagtaaagctgtttggtgaatcgatagaagtcaaagcccatatagaaaagatagagggcatcagcggccatgcggatcagacagggctgcttgagtgggtcggcagtttcatggaacggccgaaacatgtcttcgtcgtacacggcgatgatgaggtttgcgacacgttcgcagctacggtaaaagagaaattcggcatggaggcagacgcaccgttcagcggaacctcctatgatttaaaagagggctgctttattactgttaccgagggcattccgatcaagcgggaagcggagccggctaaaaaggccgcaggtgtattcgggcgtctggtggctgccggtgaaaggctgcgcagagttattctgaataacgaaggcggcgccaataaggatctggcccgtttcgcagatcagatcaattccctctgtgataagtgggacagatagaaaagactgagaatgaacctgcaaaggagagcataatttgaaagtggaaatttatacggacggttccgccaggggcaatcctgacggaccgggcggttttgggaccgtgcttcattaccgcgacggctccggccagctgcatgtgaaagaaatatccggaggatataagcggactacgaataacaggatggaactgatggctgcggtggcaggcctggaagcgcttaaccgcccctgcgaggtcagtctgtattctgactccaaatatctggtggatgcttttaaccagcgctggatagacggctggataaaaaaaggatggaagcggggaaagaatgaacctgtcaagaacatcgatctctggcagcgccttctggccgccaaagagcctcatcaggtgacttttatctgggtaaagggccataacggacatcctgaaaacgagcggtgtgactttcttgccacatcggccgccgatggggacaaccttctgacggatcccggagtgcaatgacattcagcatctccgcgccaggccgccgtttccaataatctgagggcaaagtcctcccggctatggaccaaagcagccgggaggacttatttattaaatatatcttacaaagtattacttatttttggaacctatttcctttcctgcgtaaatatgatatctttattttaaataacgcgaggatggataaatattgaaaaatagaggcgtaataattgcaattattttgattttaataatgggcgcaggggtgactgccgggacaaaacgttttataagcgataaaacgtcgggcagtcctatgcctgttttggaagaacaggcttcgccttcttccggtcagggcatggagagtatgcctgtagcggccgccgggatcactcctttctcagctgacggtgaagcgggggcggaggactccggagaaggaactggaactaaaactgaagccggacagacttttagtgcggcagatacgaaagagaaggacggcagccagacggaaggggctgccgatagaatatattattccagaagtagtgatacggccggagagacagagcagacggcggcggccgtttcggaagaacttaatcaggcggcggctccggctgccggttcatcattgcctggagagagttctgcagagatgaaaagcagtgttgtaatatctccgctcaccggggtgaatgaatcggatgcggtaatcgccgataactccaaaacactggaaggctaccggaaaaaactgagcgagatagacagcctggttcagaatatgcagagtgcggaagcgggttccaatacggattccctgaaaaatgtcgcagactatgaataccgtctttgggatacggaattgaaccgcatttaccaatccctgctggagggaatgacggaggaagaatcggaagctcttcgggcggaagagagggaatggatccggacacgcgacctcgctgccaaaaaagcggcggccaaatacggcggcggaacgatggaaagccttgaatatacggcttcattgtctgcttctacgaggagccgtgcctatgagcttttggacagctatggtgactatttagaacaggaagaagattgaccgggattctttaaatgcagagtacagccttcacggccggagtgcggccgtgaaggctgttttgtatgatttcctcttgataaatggattttcctatgataggatataaagaatgaagaaatatatagaaaagacagaaacttacaggaggaagcaacgtggaaaaatacggtgtaaacgaacttagaaggatgttcctggagttctttgagagcaaaggacatctggcaatgaagagtttttctctggttccacataatgataacagtctgctgcttatcaattccggcatggcgccgttaaaaccatattttaccggacaggagatcccgccgaggaatagggtgactacctgtcagaagtgtatccgtaccggcgatatcgagaatatcggtaagactgcccgtcacggcactttttttgaaatgcttggaaacttctcattcggtgactattttaagaccgaagcaatccactggtcatgggaattcctgaccgaggtggtgggactggatcccgaccgcctttatccgtccgtttatctggaggatgacgaggcgtttgatatctggaataaagagatgggtatccccaaagagaggatattccgtttcggcaaagaggacaacttctgggagcacggcgccggtccatgcgggccatgttccgaaatttactatgatcgcggcgagaagtacggctgcggcagtcctgactgtaccgtaggctgcgaatgtgaccgatatatcgaagtctggaacaacgtattcacccagtttaataacgacggccacggcaactatacggaactggagcataaaaatattgatacaggcatgggcctggagcgtctggctgttgtagtgcaggaggtagactctctgtttacggttgatacaaataaggctttactcgaccgcgtatgtgagctggctcacacaaaataccaggaagaccacgaaaccgacgtttccctgcgcattgtggcggatcatatcaagtcatgtaccttcatgatttcggacggaatcatgccttctaatgaaggacgcggatatgtgctcagaagacttttaagacgtgccgcacgtcatgggaagaaactgggtatcgaaggtaaattcatggcagaactgtcaaagacagtgattgccctttcaaaagacggttatccggaactggaagagaagagcgccatgatttttaaagtgctttccgaggaagaagataaattcaataagactatcgatcagggacttgccatcctggctgatatggagactgagatggcaaagaacaatgagacggttctttccggcgataacgcattcaagctctacgacacctacggcttcccgattgatttgacaagagagattctggaggagaaaaatctctccctggatgaggacggttttaccgccgcaatgaaaaaacagaaggagcaggcaagagcggccagaaagacaacaaactatatgggcgcagatgtcactgtataccagtctatcgatcctgcagtcaccactgaatttgacggttacggtaaactggcggaagaatccgagatcacggttcttacaacggaaacagagattgtagaagctctgactgacggacaggccggtacaatcattgtgaagaaaactccgttttatgccaccatgggcggacagcaggccgacgtgggagtaatcaccgcacaggatgccgagtttacagtaaaagatacaattaagcttcagggcggtaaggtaggccatgtcggttacgtgactaaaggcatgttcaagacaggagataccgtgaccctgaaggtcgataaagagaacagagaattgacggaacgaaaccattccgcaacccatctgcttcacaaagcgctccgcacggtactgggtacccatgtagagcaggccggttctctggtgacaaaggacaggctgcgttttgacttcacacatttctccgccatgacagacgaggaaattgccgctgtggaaaaactggttaacgacgagattgccgccgctcttccggtcgagacgatggtcatgacactggatgaggcaaagaagacaggcgctatggcattgttcggcgagaagtacggcgacagtgtaagggttgtaaagatgggggatttctccaccgagctctgcggcggtactcatgtggataataccagcagtatttctgcattcaagattgtatcggaagcaggcattgccgccggcgtaagaagaatcgaagcgctgacatccaccggtctcatgaattactataaggagatggagaaggaacttcatgaagctgccagagtcgttaaatccacaccttccggactgacggcaaagctggaatccatgctggatgagattaaggcacttcactctgagaatgagaagttaaagagcaagctggctaatgattcccttggcgatgtcatgaaccaggtacaggaagttaacggcgtaaagctcctggccgtacaggtaaaagacgtggatatgaacggcttgaggaatcttggcgatcagctgaaagaaaagcttggagaaggcgttgtagtgattgcgtccgtacaggacggcaaggttaacctgatggcttcggtaaccggggaagctcagaaaaagggcgcacatgccggaaatctcatcaaagcaattgccggacttgtcggaggaggcggcggcggaaggcccaatatggcccaggccggcggcaagaatccggccggtatcccggatgcactgaaaaaagctgccgagaccgtacgggaacaaacaaaatagagtcagaacaggttagggatatcgataaatcatgaccacccgtcaaacgggtggtttgctcgcccctataaggggacagttaccggccagcgcctaaagacgctggctttcactctgttcaagccactatgcccttgactcgtcgcccccctttaaagggcgtttgtaataccggctacccttaaaggggtcctcatattcctttacactcagtttatccattgctatatcatacttctcctgttcctgaatgtacttcctaactgttgcctcatttagacctactgtactgacataataaccttctgcccagaagtgacgatttccgtatttatactttagatttgcgtgcttatcaaatatcatcagcgcactttttccctttaagtatcccataaagctggatatactgtatttcggtggaatacttaccagcatatgaatatgatctggcattaagtgaccctccagtatttccactcccttatatccgcataacgtttttaatatatctcgtatgctttctttatattgattataaatcatttttcgtctatacttaggagtgaacacaatgtggtatttgcacatccactttgtatgtgccatatcatgtttcttgtgtgccattaaaatcacctttcctttcttagatagtagcttgaacaactctattctatcggaaaggtgatttttgtgctataagcacttgctgcaccacccgcaaagcaggtggtttcctgtttcaggcattatcatttttcggaacacgaaaaactccaatgccttcaactggctaaagccagaacgatgacctgcatgctccgcgcacaggtcacagctttcaatcaaaggaagaagaaccgttacggcaattgaactgctccggttcttctttctttattacttttctttatatctgaaacagcatttacagcactgcggcttcgaaggtaccggcggctttggcggacacgacggctttggcgggcacggcggctttggcgggtacggcggttttggcgggcacggcggttttggggaacatggcggcttcggtgggcatggtggcatcatagaccacagcccttcagtctgccatggataaaggggccagaacacaggaaaccaccagccggaatacatcattccccaagggcattgcgaaaccggaagaaagccttcattcccgctgtcagcatagctgtaatcattattggaattatgatagctgctgttatttctttcactgccgttattgcactcatagcccattcggctgtcgttattatcaaaagatatgggattgctcatgcattattcctccttttatagatgtggacggacgctaatttgtcctgtttttatatagtatgacaggccggccgggaatgtcccgtttttaaagggatattaaatcacagaatcaaatacttgaaaaacaatttgaagaaatttcaagaaaacatgaaaatcctgttgacgtatggaatttttatgatataattttactagtgctaaaaaaatacccaaacagttgtattaatatgcacttattacacaactggagggaggttaggtgtgagctatgtcaaatgtaatcgttaaagataacgaaagcttagacagcgctttacgcagattcaaaagaaactgtgcaaaggctggtattcagcaggagattcgcaaaagagagtattacgaaaaaccaagcgttcgtcgtaagaaaaaatccgaagctgctaggaaacgcaaatataattaatcaaacgataatctgattgctttacgcacaggttactgtctgcaatgatgaaaagtccgcgtacttttcaccgaaaatcaacgaaacaaaatccctggtttattaagccagggattttttactctgtatgggaagactgtttattttcagaaaaaggaaacaaaacagccagaagagaataacgtgaggaggagaattcatgacaaagataaaaaggagagtaatatgggctgccatagccgcatatgctaccgtgtttttcctgaccagtgatacactccttgcatttccgcttttaatggaaccttcctcggtattctgcctgccggtaacggctggtatcgctttcctttatctgaaagcattttttccttttgaccggagacggattttaatcagttttgtatccggtatcctgatggggctgatgtttatcctgggagtcaggtattccgtcaacgaggtaccggcgccttcggccttcagctttctgactgcgcttctggcagcggcattgctgttttctgcatttataagcctgcttcttaagagtctgtcccttgtaccggcacgtaccggttcagcggcagcagaaaaaacaggcgtaaagacattagccgcactgtttgccgtcacctttgccgtgtatgcggcagcatttctggcggtatatccgggaatttactcctatgacgcttccgttcaggttttacagtttttcggcgataatccggttaccagccatcatccgattctgcacaccttatttctttgcggaagtctgaaggcgggggaggtactgtttcacagctatcaggccggacttgccctctacagtctgattcagattacctttatggcagcggtaatcacctttgtcctgtaccgtatggttcgaagaaacgttccaaactggctggttattctctcctggctctttttggcggccaatccctatatgcaggttcttgctttactgacaaccaaggatgttctgttcggggctttcttcctgctgacctttgatttttcgattgacatggtatctgatccggaacgcttcttttcaagccggattatgcaggccggtttctttctgtctgcgttcttttcctgtctcttccggaatcagggaatccatgtatttatatttttctcgctgtttgcactcgttttctttatccggcataaaaacagcggtaaagcccgtaaactggctctccgatggaccatctgtgcggcggcgctgtctgccgtgtatttgacattaaacggccctgttctcacagcgttcggcgtagaaaagggggatgccagggagatgcttagcgtgccgatgcagcagctcgcgagggtctggcacgaagcgcctgaaagcctgacgagggaagaaaaggcttatattgaatcgctgatacttcctgaggccctggatggctacgtgagggtaaatgccgatccggttaaaagcggttttcagacgaatgtcgtcaaagaagatccgttaaagtttgtcggaacctgggccggaatcggggcaaaagaaccgctcatttatctggactcttttctgatgggcaactggggatactggtatcccggagagacacagtactggatcagctacattatgtttgacggtgcatttttggaggatgaatataacgttcttcatatcttccggaacagccgttttccctggtataataattatctgaggacaatcagcctgaccccggaatttgaaaagattccccttttgtcgctgattctgaatcaggcttttccattctggctgatgcttgcggccgggactgtatctatatatagaaagcagacctgccttctcgtgtctttgtcgctgattctggggtattgggggacgctgctgcttggccctgtgaccggtgtcagatatgcctttcctctgatgctgtgcgtgccgctgctgtttgaactttttatgtatgggacagcggggagagttgagaattaattgagaatgggaggatgcgtccggaacggaccggggccggtgcggtggggagtcagtccgctggccgtaccggcggcgtcctcacctgcctaattaaatctccctgctgctgcgaataaatcaaaataaaatttcatataatctctataaggattggaaaaggcggtacgctattgttaaacaggcaaaaaaaagcggtagtatcggccctcaatctgccggaagatgtcttttttggagagatgcttctgttctttaccggcagccattcggctgtggtggaaaattacagaagcattgttctatttacggacacggtgttaaaacttcagggcaaaaccacgaagctcacagttaccggaaagaatttttctatcgaatattacgataaagaacagctgaaactgacggggcagataaggtcggctgaatttgaatctatctgattctgattccaggaggagttatatgaaatcgatacgcaggttttgttccggcagcgtccggatccagatgacaggcgagtctccggaacgtttttttaatttatgcgccgcttccggcttagatatctgggacgttatattttcaaaaggcaattacatattttcaatgggcatacacgatttcttttccagtaagccctttataaagaaagcgaagatcaggcttaggatacagcaaaaactgggacttcctttttttttacataaaaacagaaaaaggaaactgtgggcggccggtttcctgagctttttcgtatttctgtgggttctctcattctttgtatgggatatcggatatcagggtaatgtaatgtatacggatgacgaactttctcattttctcgacactctcggaatccactgcggaatcatgaaaaaccaggtatcctgcgaggagctggaggctgcgctgagaaatgagtacgagggcataacttgggtatcggcccgcttaagcggaacgaagctctatatccatgtcaaggaaaatgatgtgccactggaaattccggtcaaagatgattcgccctgtgatttggcagccgagtcagacggaacgatcacgtccatgattgtcaggagcggtattccccttgtaaaacccggagatgaggtggaaaagggacagattctggtcagcggcatggtcccaatcacagacgacggcggaacggtgatatcagggcgctatgtccattccgatgcagatattatagctgtcagagagaggacggaatccagggaaatacctctgtggcatgaaaaagaggaaaaaacaggccgcgtccggaaaggactgatgatgaacattaaggagcactcgtttgtatggctgcttcccaatttcaggaatacagagtggaagacggtgactgaaatcaggaagatcaggctttttggtgatttttatctccccatggagctggggtttatcacctccggcgaagtctcttcctatgacgtaaaatatacggaaaaggagctggaggagctgggtgaggcttataaaaatgaaattgcggaaaaattaatggaaaaaggggtacaaattattgaaaataatgttaaaatattagttaatggctcctcttgccgttttgaagtaacgatgcggacagaggaatccatcgaaatggaaacagaaatagaagcacaaggagaaacacaaggagaacagccagccgatgagcataattgaaacagttatagatattcccatggaacatgtacaaaatgtctgcggccagtttgatgcctaccttaagaaaatcgaacggactctgcatgttaccatgattacaagagatggggcgctgaagattatcggtcccgaacaggctatcagacaggccaaaagtgtttttaacaacctgctggagctttccaaacgaggcaataccatcacagaacagaatgtcgactatgcaatttccctttcctttacggagcaggagggccagattcttgaaattgataaggatatcatcagccgcactgtaaacggaaggcctataaagccgaaaaccatgggacagaagcagtacgtggatatgatacggaagaaaatgatcgtctttggtatcggaccggccggaacaggaaagacctatcttgccatggctatggccatccaggcgtttaagagcggtgaggtgaaccggattatcctgactcggcccgccattgaagcgggagaaaagctgggctttctgccgggcgatctgcagagcaagatcgatccctatctgcggcctctatatgatgcgctgtatcagattatgggagccgagagctaccttcacaattcggaaaagggactgattgaggtagcgcctcttgcttatatgaggggccgtactcttgacaacgcctttatcatcctggatgaggcccagaatacgacgcctgcccagatgaaaatgttcctgacacgtatcggtttcggttcaaaggtaattattacaggagaccagtcccagaaggatcttccggccggagcggtatcgggactcgatacggcggtaaaagtactgaagaatatagacgatatcggattctgcttccttaccagcagtgacgtagtgcgccatcctctggtacagaaaatagtggaagcctatgagagctttgaactgaaggagaaaagggatacgccggagggcaggagatatgtaggccgggggcgttcctcttctgatgacaggccgtcgccgaaagggagaaaaaacaaatgacaattaatatcgaatacgaagccgagaagaagctgaacctgccttatgaatccatcatagaggatgtggttaacgcctcactggattatgaaaaatgcccctacgaggcagaggtcaatgtcatactgacggataatgcggagatccggagaattaaccgtgaattccggcaaatcgacagcccgacggacgtgctgtcctttccgatgggtgattttgatgttccttctgattttgaacgcatggaagagcagtctgaggattattttaaccctgagaccggggagcttcttttaggcgatatcgtaatttcggtggacaaggtagaagaacaggctgaaaaatacggccattcccagacaagggagctggcttttctggttgcccacagcatgctgcatctttgcgggtatgatcatatggaagagcaggagcggattgccatggagaagaggcaggaggaaatcctgagtacaggaggttttgccagatgatgaaacgggggttatactggcgctggcagccggactctgtctgagtgcaggctgcaccaggtatgaggaagtgtcggttacagccggcgttaaagagacggaagagacaaaggtgattcagattacggagccggagacggaaccggagacagagggtgacagggaacttctgcgtatcgagaaggacggcaagatccccagctatcttacgggggaaatgacggacctggcaattgcatggcggcggcctgttgcgatcatgataagtaacgataaagcggccttgccccattatggcattaaccatgccggagtgatttatgaagctcccgtggagggcggaatgaaccgtttcatggctgtaatagaggattatgacaatctggagcgtattggttcggtgagaagctgccggacatactataccttttttgcacgggaatttgaagctgtttatgcccatttcggccagagtgttttcgcacgtccttatctggaaaagatggagcatttaaatgggattgagggaaaaggttccgtggctttttaccggaccaaggataagaaagctccccacaatgcatatgcaagcggagaacgcattcaaaaagccatagaggctatgggatattcccaggaatatccggaaagctacaccggccattaccgtttttctaaaaaagagtatccggtcatgctggagaatgggttttcggcggcgtttgtgcgcccgggatacgttatgaatgatccctggtttgaatataatgctgacgacggcctgtattaccgttttcaatacggcggcccgcacaacggcgacgagggccagctgacggctaaaaatattatattccagtattgcggctggaaatattattcatcgtccgaatatctggatatagatgtacatagtcccgggctgggatactatttcaccaatggaagaggagaacggctcacctggacaaagggcagcgctgacgctgtgacaaaatactatgatgaaagcggtcaggaaatattgctgaatccgggcagtacctggatttgcatcatacaatctgaccggatggataaggcggaattttatggagaacagacagagtagacgtaaaacaaagggcaaaagggaatcgaatttcgttgtccagggaagtatcctggcagtggcggggatcattgtaaggcttatcggcatcttgtaccgggttccgatgaccaatattatcggtgacgagggaatggggtattattccacggccttcaatgtttataatatcatgctgatcctttcttcctacagccttccgctggcggtatccaagatggtatccgcgaggatggcgaaagggcagtaccggaatgctgtccgggtgctgaaagcggcccttgtctatgctacggtggtgggaggaattgcctgctttatcacctggaattttgctgatttctttgcaaccacagcgtttaatacgcctttttgtgtctatgcgctcaaaacactggcacccactatctggattatggcctatctgggcgtgctgagaggattcttccaggggcatggaaccatgattcccactgccatctcccagatttttgaacaggtgatcaatgcggtaatcagcgttgtggccgccggtgttctgtttaagatcggcctggattccaaccgggtttacaatacgaccggttatccgcaggcattcggagcagcaggaggaacgatcggcacaggtgccggcgctctggcggcgctgctctttatgctgttgttattttccatctactggccggtggttaaacgcaggaaacggcgggacagaagcaggcgcaccgattcctacggggatatctccgtgacatttttatttacggttgtgccggttatcatcagttcggccgtctataatatcaatgccgttgtagataacagcattatggcttacggaatggaggcgctggggcgcggaaaggaatttctgtctctctggggtatctacaataacaaatatatgcttttggtccacgtgccgctggcaatggccaattccctttcttcctcgctcatcccgtcactttccggggcggttgccagaaaggaaaagggggcggttatcgccaagacaagccttgccatccgttttgccatgctgattgccatcccgtcggccgtagggctgaccgtcctttccgctccgattaataatctgcttttcaagagcggcgacaacacagaggctatcaggatgctgattaccggttccgcggcagtgatattcctgtccatgtcgacagtgaccaatgccattttgcagggcatcaatcatatgaatgtccctgtcagaaatgcattcatttccctgatccttcatattggggttctctatctcatgctgatggtgtttaagatggggatttacagtatggtgttcgccaacattgcgtttgcggtattcatgtgtatcctgaacgcaattgccatccggaggtatctgaattaccggcaggagattgtaaagacatttctgctgccggccgttgcatcagcttttatggggcggcggcattcggagtatacaagggcgtgaccctgattataaaaagcaatttgcttggaactatattcgccgttctggcggcaattgccgtgtacggggtgctgttaatcaagctgcgctgcatagatgaggaagaactctattccatgcccggaggcacgaaagtgatccggctttcaaggaaactccatttaatgtagggagttaattgagtaaggaggacgcggacgggaacgtccatggtccggtgtggtgagggatgtgtatgagtcttcagtcccctttggcaggtagccgtgaagggggaatcgccaccccgtccgctggccgtcccggcggcgtcctcacctgcttatttaaattcataccagcatgaggatgtttaagatagaagaaaaaggcagatactattagtacttaaggaggaattccatgaaaaagtattatatctgcttttttctgttagcggtatttttagctgcatccatactcacgggagcgtatatttatttttaccggcctgagcatgcccagcccgtaccgggccagattctggagtcggagtcggcgccggaggataatgtggtaattaaccagaggcaggttgagacaagagaggaaataaagaattactgtcttgtggcagaagaaggttttcttctcgtctttgcaaaggaccgtgacaatgtatgtctggatacccatatgccgctctcagaatttccgctcagtgagcaggaaaaattaatggagggtatctggttttcatccatgatggagatattcaattatctggaatcctacagcagctaaaacttagtgccgcggcgcgatgaaaagtaaacttttccccacaatcaacggcgcttttttgccgtttctgtgcatcatttgttgcagtttggccgaaggctgaacagtgacaatgtgaccaataccgccgaaaaaaacgagacaggagtcggattaagtatgaaaaaacaggtaacaatcattggcgccggagcctccggcatgacagcagctatcttcgccgcaagacagggcgcccaggtaaccctgctggagcatatggatcgggttggaaagaaaattttgtctaccgggaacggtaaatgcaacctttccaatcgttttatggaggaaacctgttaccgaagcggagtggctgattttcccatggaggtaatcagccgttttaccgtggaggaaacactttccttttttgaagatctgggaatcgtcgtaaaagacaggaacgggtatctgtaccccactccgggcaggcttcttctgttctcgatgtgctgagagcggagcttgaccaccgccggatccgtacggtaacggagtgccggattgatgcggtccggtacagggaaacaggagataaacggttcaaagtctccacctctcaggggagcttcctttccgactgcctgattcttgccaccggttccaaagcggctccggcaacaggttccgatggaagcggctaccaactggcagagcagctggggcatcatatcataaaaccgctgcctgcgctggtacagcttcggtgccgggaaaaattctataaacagatttccggcgtacgcacagacggctgtgtatcattgagatgcggcagcaaagagctggcaagagaccaggggagattcagctgacggattacggtatttccggcatccccgtattccaggtcagccgttatgcatcaagagccattgaccgtggggaaaaagttactgcggttttggatttttatccggatgcgacatttgagaagacacgccgaatgatggagggacgcaaattaagctgttccagtaaacctatggaggatttcttcaccggctggtttcacaaaaagctggcagctttatttataagactggcaaatctggaaccacacaagcaggccggtttgctgaccgtggaagagattgaccgtctgacctgcgttatcaaagaatttaccacggaaataacagcggccaatccgtttgaaaacgcccagatttgctgcggcggagcagatgtccgtgaagttgctcctgaatcaatggagtcgaaacttaagaaaggcctgtatctgataggagaactattggatgtggatggtatctgcggaggatacaatctgcaatgggcgtggagtaccggtgcgatagcgggaactcacgcaggactgtaatatgatacgtatcaatcagttaaaactgtccgtgggacacacaaaagccgatatgaagaaaaaagcggcaaagatgatgaggataccggaggataaaattctttccctcgtgccggtcaggcagtccctggatgccagaaaaaagaatgagctgctttacatatattccctgaatgccaccgtttcaggaaaagaaggagccgtaattaaaaatgcgaaaaatgtcaatgtggtgctgaataccgaaaaaccataccggtttccggagcatggacaagagccgctttgccacaggcctgtgatcgttgggtttggccctgccggcatgttctgcggcctgatgctggcaagagccggcttttctccctgattctggaacgcggtgaggatgtggattccagaacacagaaggtggaggctttctggcggggcggagaacttaatccggaatcgaatgtccagttcggtgagggcggagcaggaaccttctcggatggaaagcttaacacattagtaaaggatccgtccgggcgtaataaaaaagtccttgaaatcctggcagaggcaggcgccgacccttccattacctacgtaaataagccacatgtcggcacagatgtcttaagccgggtggtaaagaatatcagacaggaaattatccggctcggcggcgagatccgttttggctgtaagctgaccgacttctcagaagcaggcgggcgccttatctcggtgaccgtgtctcagagggaagagggaggcttttaccgggaagaaacgataccggcacaggcagtggtgcttgccatcggccacagcgcacgcgataccttccgtatgctctcggaaaaaagcctggacctccaggcaaaggcttttgcggtggggctgcgcatccagcatcctcaaaagcagataaatttctcccaatatggagtggaggagcccggctcactgggcgcggcaagctataagctgacgaagcagacttcttccgggcgcgggatttattcattctgtatgtgtcccggaggctttgtcgtcaatgcatcctcagaaaccggccgtcttgccgtcaacggcatgagcaaccatgacagggcgggaaccaatgccaacagcgcccttatcgtgaccgttacaccggaggattttcccaatcccggaccgcttggcggagtcgaatttcaaaggaggctggaggaagcggcatttaactgcggaaaaggaaaaatcccggtacagctttacggtgattttaaagcgggtaccctttcccgggctttcggggatgtggaaccggccttcaaaggagggtattcctttggaaatttaagggaagtgctgaatccgtctctgactgatgcaatgacggagggaatcgatagttttggccggataatcgacggcttcgaccgtccggatgcaatcctggccggaattgaaagccgtacctcatcaccggtccggataccgcggactccagaactcgaaagtgcagtccgcggactctacccctgcggggaggggccgggtatgccggagggatcacttccgctgcaatggacggcataaggacagcagaaatgatcgttaccagattttcgccctctttttattgacgtgtttttataaatgaggtaaactggcagaaacgatgaaagaaatacatctgtaattaatagtgacattacttagaaactatgaggggaaagaggattttatatgacagatttcagggcagcattaaaagaaaaaaagagaattgttataaaaataggttcgtcctccctgacgcatccggagacaggggatttgaatctgagaaagattgaacagcttgtacgtgtattaagcgatctgcggggccagggcagagaagtgattcttgtatcctccggagctatcgccgccggacggcaggcgctgggcttcaacgaacggcccaggctgctggaagaaaagcaggcatttgccgcggttggccaggccaggctcatgatggtctatcaaaagctgtttgccgaatataaccagacggcggcccagatattaatgacgaaaaatacagtgacaaatccacagtcccgttttaatgcgcacaacacatttaacgagctgctgaagctggggactatccccattgtcaatgaaaatgatacggtcgcaaccgatgaaatccagttcggcgacaacgaccggctttccgctattgtggcggctctggtggaagccgatatcctgatcctgatgtcggatatcgacggcctctacaccgatgacccgaacaaaaacccggatgctgcattcataccgcttgtcagagagctgacaccggaactgcaggcgatgggaaagggagcctcgagcagtgtgggaaccggaggaatgtccgccaaactggcggcagcccagattgccaccggaagcggttcagatatgctgattgccaacgcctgcgacttaaatgttatttacaggattctggagggggaagagtgcggaactctttttaccgcccacgaaaataaagatttcgatctgaatacatatctgaacagtgaaagctgaaaacactgccggagttcagacaggaaaggacagattaaataatgaatcaggataaaattgaccgaatcaatacactctaccacaagagccagtcagtcggccttacggaagaggagaaggaggagcagaaattgctccgcaaagaatatatagaagcaatccgcagaaatatgcgcggaacgttaaacaatatttcaatcaaggagaaagacggtactatcaccgacttaggtaaaaaatatgggaatatcagtgacatccaaagctgaccttagaaaaaaggttctggagcttagaaaaaatctgacggaagaagagacggccggctgggatcaggcaatctgccaaaaaatcaagaatctcgggttggaaaaacagtatggtactatttactgttatatcagcgttcgcggtgagacaggtacggaagcgttaatccgctggtatctggagcagggactcaaagtagcggttccacgcgtaaaaggcagggagatggctttttactatattgactgttttgaagatctggagccgggctgcttcggaattcccgaaccgaaaaaaagctgtatgacggcagaggaaacagacgcacccgtcattgtgccgggagtcgcattttcggaacgctttgaaagaaccggctacggagcaggttattatgaccgtttctttgaaaaggaaccgcagcacagaaagatcgcaatctgttatgatttccagattgcagaggctatagcagtggatcagtatgatgtattaatggatcagattatcactcccggaagggaactgagcagattgtagaaaggagaggtacatatgcttgaggttattggcaaacaggcaaaggacgcttccagaaagctggcagttctcggctcagtcagaaagaatgaagggctgagggccgcggcagaagctcttcttgaggggaagaactcattctggccgccaatctgaaagatatcaggaaagcagagcaaacgggaatgaatccggggatgatagaccgtctgaccctgactcatgaacgtcttgcagctatcatcgagggtgtaagacaggtaatcagccttgacgatccggtcggcgaggttttgggcatgaaagaaagaccaaacggcctgctgatcggtcagaagcgcgtaccgatgggcgtcataggcatgatctacgaagccaggcccaatgtcaccgtggatgcctttgccctctgttttaaagcgggcaatgccgtaatcctgaagggaggaagcgacgcgctggaatccaataaggaaatcgtaaggtggctcagaaaagggcttgaaaattgcggtctgccggcggactgcgtacagctgattacagatacggatcgcgaagtgacaaagcagtttatgaggatgaacggttatattgatgttcttattccgagaggcggggccggcttaattcgcaccgtggtggagaacagcaccgtcccggttatcgagacaggaacaggaaactgtcatatctatgtggacgaaactgccgactttgatatggccctggatattattttcaatgccaagacacagcgaatcagcgtctgcaattcctgtgaatcactgctgatacaccgcaaaatagcaaaagacttcctgccgcttctgaaaaagcggctggatgaaaagcaggtggaaatccgcgccgatcaggagtccgcagctatagtacctgactttaaaacagccacagaagaagactggggaatggaatatctggactatattctgtccgtaaaacaggtagactccgtggaggatgccatcgaacatataaaccggtataatacaggtcattccgaagcaatcattacaaaagattacgacagctccagaaaattcctggatggtgttgatgcggctgccgtatatgtcaatgcttcgacacgctttaccgatggttttgaattcggcttcggcgccgagattggaatcagcacccagaagcttcacgcaagagggccgatgggcctgaaagagttgacgacgacgaaatatattatttatggcagcgggcaggtgcggccttaactggaggatttagttgagaatggaggacgcgtccggaacggatcgggtcaggtgtggtgagattggtttttctgagtcttccgccccgtggaggttggtcgtggagggggaatccggccggaatgaattgctgcggggaccgtttgcactctttggagtgcgcatcagtgctaagctcgtaagggacctcgctaagcaccggcggactcccatgtcccctccgcaattgattccgcctacttcccctggtccatgttttcgcaggggacggaagactcaggcaaaggttttcgcggcacctgacccggtccgctccggacgctgattgtctccagtctcaaaggggagggaaccttacaccaaactacaataaattgagcggaattaaatccggtgatattcttccgggcttatttccgctcaatctgtttaaatatcaattgtatcaaatttccaacaaatatactaatacaactactttagcccatatccaacatatatctaatgcttttggatgcgctgagcggccgcgacaaggtccgccccgcacttaacgcgtgagacactcagcggccgcaggccagtggacggggccgatacacccggcggagtctttcgtcccggcgaaaaccttcctttggggcggaggagaagatatagtctgcggacgcctttggaatccatcgctgatttgcgaggtcctgtcgagcttagcagcgtgatgcattccaccgagtgaaaacgtgctccgcagactatatcttctccgcagcccaaaaccacaacaatcttccccagggaacgaaagactcataaaaccacctcaccaccccgtccgccggccgtaccggcggcgtcctcacctgcttattccaatctataaaacatagcctcatcgaataaagccgccagctcagcctggtcgccgtactcaaatccgattctcccctcatatgccatggaatcacaggaatccgtcgccacgtagattcgaagcgtcctgccatcctccctcaggaaatcgattgttgccgcataaggacacttggaaaagccgtacacattggtatcgtttatcgcccggtccatcatctttgataaggtattaagcttttccctgtcttcgattgtctgcgttctcacctcctgggtgaatgtctcatcaccgctgcccgacggaatcaaaaattcaggaaatgtcattgcggcgctctttaatggtgttttaaaccaatccggatcaaagtccctgtaatcagtcccaacgacattctgtatttcctccattacaagccggtaaagttcttcattcctctgaagggctatgaattcattatcgtttttggaatggactatcatataacccggagtatcatgattcccaaaaaactcatattcccggtcatccagaatcagacttgcaccggtgggcaaaagagagcggtccattttgcgcagacgcgtccaggcctcctgacgtgtggcaataccggactctgtctccgaggaagacagcagtccgcggattatttccgctttttcatcatctaaggaaatctggcagggatatggttctgaataaaattccaccgtgtcatcgttctggtaatagaaccagaccgaaggactgtttccatcgtaaaatgaaaggcccggtttacttttcaggaagtcaagcgccgcccttccgttttcattgaatgcatattgaaaagacggatgagccgtacttcctgatgctcccgacaaaccaaaacaaaagctgtccagcgtatcatatccgaacggcatgtctaaaaatgtatatccgcccaggcggtagagaagaatttccgtaccatccccgttgtaataaccaattctcagttcttcaccatccgtatcaggtcccgaataattggcaatgctgacattcttaaaatcatcgtaaaccggcgcatcctcacgccggaccgcaatataatactccatctttccgccgtcggtccgtcccgtaacatcataatgtcccagaagcagatccgacagcttctttgtcctgctttcttccaccggccggaaaacggcatcgtcaatatagcgttccacgagggaaatatattcatcctgcaaacggagagccgttacttcctctgtttcctctgtttcgcctccatccggcacagcagggacggagacggcgggttccctgctcgcagagggcggttttgcgcatgcggatagggcagcgatagctccaaacaggattgcgcagtataactttttcataaaagatacctttctgaatactatgctgaccgtttatacgttcgacgggcacagatgtcagaccttccatattttagttcttctgtcaacaacttcataattacaatatcataaatggaacaggagtttcaattaacaatctcttaagagttattaccttttttgcgattcaccggtcccctcattattcggcggtactgtgaatgtttttgtcattatatgccggtagtggaagctgcttcctcattttccagcaaaaacagcccttcagtgggggaattgtagtaaaaatgtaagatagagggaaaattcgtaaaagaaatgcacttgataaattcattccattatagtaatattaactaatgtatgaaaacgatggaagatgtaaggagaaatacatattttatgacttcaatagattacgagacaatcgacctgtccggcctgcccctgagacggagcctgccagacaacaatatttcattgccaggtgcagacaatgggtcacagaaaagagcgaagagctgggaagaccgatgacctgttttatctcaaccttcggatgccagatgaacgcccatgattcggaaaagctgatgggaatcctcctggaagccggatttacggaggggcagagcgaggaatccgactttgttctttataatacctgcacagtccgcgagaatgcaaatcagcgtgtttacggacggctgggctatctgaacagcctgaaaaagaagaatccccatatgataatcagtctctgcggctgcatgatgcaggagcctgaagtggtggagaagcttaagaagagttaccgctttgtcgatattattttcggcacccataatatatacaagctggccgaacttctctcagagagaattgacggcaggaaaatggtaattgatatctggaaggataccgcgaaaattgtcgaggatcttccgtccgaacggaaatacccgtttaaatcgggggttaatatcatgtttggctgcaacaatttctgcagctactgtatcgttccttatgtcagaggacgggagcggagccgtaatccggaggatatcatacgtgagatagaagcgctggttgcaagcggtgtcgtagagattatgcttctcggccagaatgtcaattcttacggaaagaatctggaaaagcccatcacctttgcagagctgctacagcagatcgagcagattgaaggacttgagcggatccggtttatgacatcccaccccaaggatttgtcggacgagctgatagaagtgatgaaacattcacgcaagatttgccgccatctgcacctcccgcttcagtcgggcagcagcagaatattgaatctgatgaatcggaagtatacaaaagaacaatatctgacgctggccgcgaaaattaaagaggcgataccggatatatccctgaccaccgatattattgtcggttttccggggagacggaggaagattttgaggaaaccatggacgtggttcagagagtccgctatgacagcgccttcacctttatctactccaaacgtaccggcacgccggccgcctccatggaggatcaggttccggaagatgtggtaaaggagcggtttgaccgtcttctcaaagaagtgcaggcgatctctgcccaggtttgcggcagggaagtccacaccgtacaggaggtactggtggaggaaccggatgatcatgaggaaggttttcttacaggaaggctttccaataacaccatcgtgcacttccccggaagcagagagcttatcgggaaaattgtcaaagtataccttgagcagtccaaaggcttttactacatgggcaggcagcttgacgccgcccgggactctcttaaggataaataaggaggaaattttctatgaaaaagcactacaagggtcttgctgttgccttgtcggcggtaatgctggccggcggaagttttacagcatatgcaggacctgcaagtgaagccggctcaccggccgcaccatcaggcaattcaggcgatagcggttttggtccgggcggcacaactgccgcagggcaccagcagcaacagtctgacacagaacaggcagcggtggaggatacctctcttcatgtagcagtaaattatacgtttgagtctgccggagatatcacggctttctccatggacttgaagaattttgacggaatcggaggagtgtcctaccgtgcctacacgaatacaggaggattcctgtggtggtatcatgacggaggcctgacaggcgttcccggagacggcaactatgtagaggcattccagatccagctgaccggagatgccgagcgtctttatgacgtctactacagcgccacatcaacaggccaggggaagatgggctgggcgatgaacggtcagattgccggaaccagcgatatcggtgagaagcttctcgatatcgaagtggtacttgttccgaaaggagcccagggaccggtgagcgatgctcccagatatgtgactccgctttcaggccgccttgtcctcgcagaaaatgcgacaacactcgtcaatgaggatggaacgggctacaacggatgggtatccaacgaccatgcccgctattatttcatcgacggacatgcgcttacaggatggcagtatgtagacggctataagttctactttgattcctacggccgccttgtacagaatgtggagccgttaatcggcaaacagagcagctatcttttgaaggtaaataaaaccctcaactgcctgaccgtctatgcaaaggatgggaataacggctatattctcccggtaaaggctatgctgacttcggtgggagacgatacgccaatcggaaccttctatactcctgagaaataccgctggagactgatggtaaacgatacttatacgcagtatgcaacaagaatcactcagggcttcctgttacattccattacatatgaggagcctgatattaacaagctgatgacagttggatacaatggtctgggagttaccagatcgctcggctgcgtacgcttaacgtgtgagaactccaaatggatctatgataactgtgctctcggcacagcggttacgatttatgaagatccaaatgtagcctccccgttcgacgtgcctgagctggttccgctctccttcgagcagacatgggatccgactgacccactgattgtgagataagagaagagaggtaaaacgtggcacagctttcaccaatgatgacccagtatctggagactaagaaacaatatcccgactgtattctgttttacagactcggagatttttatgagatgttctttgaggatgccttaacggcatcccgggaactggaaattacattaactggaaaagactgtggacttgaggaacgcgcacctatgtgtggcgttccttatcacgcgcttgaaggttatttgagtaaactggtccagaagggctacaaggtggcaatcggagagcaggtggaggatccgaagacggcaaaaggtcttgtgaagagagaggtaatccgggttgttacgccgggtaccattaccaattcccaggctttggaggagtcgaagaataattacctgatgggaatcgtttatacggacggaatattcggaatctccgtggccgatgtcagcaccggcgattaccttgtcaccgaagtcaaatcagagcgcaatctgattgatgaaatctacaaattttcaccttctgagatcatatgcaatgaagcattttatatgtcgggaatcgatttagatgatttgaagaacagacttcacgctgtaatttcagatctggataatcggttcttttctgatgaattctgcagaaaacttctgcgggatcattttcatgtagagaatctggaaggccttggactttcagactatgagaccggcaccattgccgccggtgccgtacttcagtatctctatgagacgcagaaaaattcattggagcacctgaccagaatcaccccctatacaaccggccagtttatgatgctcgacacctccacaaggcgtaacctggagctgattgagacgctccgtgaaaagcagaagagggggaccctgctctgggtgctggacaagacaaagacggcgatgggagccaggatgctccgttcctttgtggaacagccgctgattcataaagaagagattttaaaacggcagaatgccatcgaagagctgaatatgaattatatctcccgggaggaaatctgtgagtatttgaatccaatctacgatttggagagacttctgggacgcatcagctataagacggccaatcccagagatctgatatcctttagaaattccctcgagatgctgccgcacattaaacatattttaaaagagttccgttcagagctgctcacagagattgaaggacagcttgatccgctggaggatttaaaaaagctgattgacgaagccattatcgacgatccgcctgtttctgtcagggacggcggcattataaaggacggctttcatgaggaggcggaccggctgcgccatgccaaaacagaaggaaagacatggcttgccgaactggagcagaaggagaaggagagcaccggtattaaaaacctgaaaatcaaatataacaaggtgtttggttattattttgaggttacaaactccttcaaagatctggttcccgattattttatccggaaacagacgcttaccaatgcggagcgttatacaaccgaccgtttaaaagagcttgaggatgtgattatgggggcggaggacaagctgttctcccttgaatacgaattattctgccaggtcagggacggtatcgccgcagaggtaaaacggatccaggagacggcccatgccgtcgccctcaccgatgtgctgacttccctctccgtggtggctgtaaggaataattacgttaagccttccatcaatgaaaaggggattatccatattaaaaacggccgccatccggtggtggagcagatgatgtccggaggaatgttcgtggcgaacgacacttatctggataacggaaaaaacagggtatccatcatcacaggccccaatatggccggaaaatccacttatatgagacagactgcgctcatcacgctgatggcccaggtgggcagttttgtaccggcggatgaggctgatatcggcctgtgcgatcggatatttacccgtgtcggcgcatccgatgatctggcttcgggccagagtaccttcatggtggagatgactgaggttgccaatatcttaagaaacgcaacccgcagcagcctgctgattctcgatgaaatcgggcggggaaccagcacctttgacggtctttccattgcctgggctgttgtggagtacataagcaacacaaagcttctgggtgcgaagacactctttgccacccactatcatgaactgacggagctggaaggcactatgagcggtgtcaacaactactgtatcgccgtcaaggaacagggagacgacatcgtattcttacgcaaaatcgtaaaaggcggtgccgataagagctacggaatccaggtcgcaaagctggcaggtgttccggagcttgtaatcgaacgggccaaggaactggtggaggagctgagtgatgctgatatcaccgcccgggccaaggaaatcgcggaaaacggccccggcattgtggcgcacaaaaaactcagcaaaccggatgaagtggatctgcttcagatgtccatcttcgatacggtcagcgaggaggacattataaaagaactgatggaactggaaatcaaccgcatgtcccccatagacgccctgaccacgctggataagatgcagtcccgtctgaggaaccggtgggttaaccagtaagtataaggaggcgaaacgatggcaaacattcaagtattagatcagaatacgatcaaccagatcgcagccggtgaggtaattgaacgccctgcctccgttgtgaaggagctgctggagaacgctgtcgatgccaaatccacggcggttacggtggaaatccgtgacggagggctctccatgatccgcgtgacggataacggctgcggaatcccgaaagaagaaattccgcttgcctttctgcgccatgcgaccagtaaaatcaggacggtcgaggatttgttcaccgtagcctccctgggttttcgcggagaggctttatccagtatcgcctccgtggcccaggtggagcttatcacaaaaaccacagggagcatgtcaggttccagatatcagattgagggcggagaggagatagcgttagaagaggtgggggctccggaagggaccacctttatcgcgagaaatctcttctataatacgccggcccggaggaaattcttaaagactccgatgacggaaggtgcccatgtggcggatttggtggaaaagattgccctttcccatccggaaatctccatacggctgattcagaacggacagagtaagcttcatacatccggcaaccataacctgaaggatatcatttataccatatttggacgggagattgccgccaacctgattgcggtgcagtcgggggccgagccggtgaaagtcgaaggctttatcggcaagccgctgattgcaagaggcaaccggaactatgaaaattattttataaacggacggtatattaagagcagtctgataaataaagcaattgaggacgcctataaaccgttcatgatgcagcacaaatacccgtttacaatgctgcagtttacaattgagccggaatttctggacgtgaatgtccatccggccaagatggagctgcgtttcagagacggagagatggtctacagaatggtgtaccatacgatttctatggccctgtcccaaaaggagctgattccccaggtggaactgccgggaggcggccaggagagcgccaatgcgcaggccaggggcctgaagccggttgtatttaaggaaaaccggcctgagccttttgaaaaacgcaggctccagacggaatcactgattaagtctgcggccacgtcagagctttcgggagaaccggagacctccgcttataccgaacgtgtgtcaaaaactgcttttccggccattgccgacatgcctgccgtttacggccggcagcctgcttcggcaggcatggcagatgccgcagaacagccggaaactcttcgaatgccgggaactccaaaggcgccggaagcccccgggcctttggagttcccggagcagtacaggccggtaccggcagaaggaaaaacacagaatccggcaggggccaaagagatacttccaaagcaggagccgccgaagcagttagatctctttgaagaaaagctgctgacaaaacaggcaagaaatgaacatgttctgatcggccagctttttgacacttactggctggttcagtttcatgataacctttatatcatcgaccagcatgcggctcatgagaaggtactttatgaaaaaaccatggcctcgcttaaaaaacgggaatacacctcccagatgatcaatcctcccatcatcctgactctgtcgggaaatgaagaactgatgctgaaaaaatacatggaacattttacagcggttggttttgagatagaacatttcggcggtaaggaatatgcagtgcgggccgttccggccaatctgttctctattgccaagaaggagctactgatggagatgatagacggcctgaccgacggcgtcgatcagggaacgccggacataattaatgaaaaaatagcatccatgtcatgcaaggcagcggtaaaaggcaatcatgcaatgtcggccgctgaagcagacagtctgattgacgaactgctggagctggaaaatccgtatgcctgcccccatggaaggccgacgataattacaatgagtaaatatgagctggagaaaaaattcaaacgaatcgcataggaagtttacataattaaattatgtaaactatataacggttttcaactcgggagcagcaccgcatatgcaggaataatagcaaggacaatagcaggaacaatatatgaagaaacctataatcataataacaggccctacggccgtaggaaaaacctccctctccatcggccttgccaaacggattgggggagagattatcagcgctgattccatgcaggtttacaggcatatggatatcgggtccgcaaaagccacaaaagaagagatggatggaattccccatcatctgattgatatactggagccttcttgcgactttaatgtcgtcatgtttcagaaaaaggccagggaagctctggaggatatttattcccgcggttccctgccgattattgccggaggcaccggcttttatatacaggctcttctctacgacatcgattttacggagacagaggaggacaatgctttccgctgcgggatggaacggctggcccgtgaaaaaggtcccggctttctccatgccatgcttaagcaggcggatccggaatcagctgccgcgattcatccgaataatattaaaagggtcatccgagcactggaataccatcatcagacaggagagaagatatcggatcataacgaggctgaacggcagaaggaatcaccctatcagtttttctattatgtcgtaaataccgaccgggcgattctttatgaacggattgaccgccgcgtggatcagatgatccgggacggactgatagaagaggtgaaatctctcagggccatgggctgcaccagacagatggtatccatgcagggacttggctataaagagattatggattatctggatggtttgtacagccttgaggaggccatccatattctgaagcgtgatacaagacattttgcaaagcgccagcttacctggtttaaaagagaacgctgcgtgcgctggctgaacctgcctgattttgataatgacagggaaaaagtgcttgaatatataatcgcggagttcaatcaggagacacagacagcacatcactgaattttaccgttatgaaaggaaatgaaaaatggaattggaagagatatacaaaaaccttggaatcagccgggaagtacttgaattcggcagcaggaccgaggctatgctgaaaacgcgcttcgaggaaatcgacagcaatgcggaatataaccagttgaaggtgattgctgcaatgcagaaaaaccgggtcagcgacattcatttttccggtacgacgggatatggatataatgatctcggccgggagacactggaacaggtgtacgcagacgtgttccacacagaggatgccctggtacgcccgcagattacctgcggaacacatgcgctttatacggccctggccggcaatctgcgcccgggtgatgaacttctgtcaccagtcggaaaaccatacgacacgctggaggaagtcatcggcatcaggccgtcgaacggttcactgaaagaatatgggattacgtaccgtcaggtagacctcctcgaagacggaagctttgattttgacgggattaaagccgccgttaacgagaaaacaaagcttgtgaccatacagcgttccaaaggatatgccaccaggccgactctctcggtgaagagaattgccgagctgatcgcctttgtcaaaggaatcagggcggatatcatctgtatggtggacaactgctacggcgaatttgtagagcgtatcgagccgagtgacgtgggcgccgatatggtggtcggctccctgattaaaaatccgggcggcggccttgctcccatcggaggctatattgccggaacaaaaaaatgcattgaaaacgccgcctaccgtctcggctcccccggactcggaagagaagtgggggccagccttggtgtcaatcaggctctgttccagggactgtttctggccccgaccgtggtggcgggagctttaaagggagccgtatttgcggcaaatatctatgaagcccttggtttccaggtcgtaccgaacggaaccgaatcacgccacgatataatccaggccgtcacctttggaaaaccggaaggcgttatcgcattctgccagggaatccaggcggccgccccggtggacagttatgtgacacccgagccctgggacatgcctggctatgattcccaggtcattatggcggccggggcattcatccagggctcttcaatagaattgtctgccgacgggcccatcaagcctccctattccgtgtttttccagggcggactgacttggtaccatgcaaagcttgggattcttatgtcgctccagaagctgctggatgccggtctggcaaggctaacctgatcatggagatttaaataagcaggtgaggacgccgccggtacggccagcggacggggtggtggggtgtgtatatgagtctttcgtcccgggggaagattgttgtgagttggggctgcgggcgaagataaagtctgcggagcacactcccgctctgtgaaatgcatcgcgctgctaagctcgacaggacctcgctaatcagcgatggatttcaacggcatccgcagactttatcttcccctccgccccaaggccaggttttcgccaggacgaaagactccgccgggggtatcggccccgtccgccggcctgcggccgctgaatgtctcacgcgttaagtgcggggcggaccttgtcgaggccactaagatcttccgtaggcgggaaatacgatatgccttcaatgcgcctttattaaggaattgcggaatgtttgatatcagtttgccggaaacacgtagtggccgcgacagggtcctccccatttaaggttggagacaatcagcggccggagcggaccatgtccggtgtgcgaaaaccttcgcctgagtcttccgtccctggcgaaaccctgaccgggggaaggaggcggaatcaattctggaggggatatggaagcccatccgtgcttaatgaggtttctcacgaatttagcacggctatgcgcttcgaaaagtgcaaacggtccccgtaagaattcattccgaccggattcccccctcacgacaccctccaaccggggacggaagactcagccatcccccaccacaccggacatggtccgttccggacgcgtcctcccaacctcagttaaatctccatatgttatagcaacagcccccgtctgagctgttaccgtttaataaatctttaataaaaaactcagcctcctgatgtatacaggcaggccggtttatgctacaataagaagaatcggtgtaatgccccataaatggaaatcattactaaccgggatacaagggagagaacaaacagaaatgagcagagcgaaaaacttctggatcctgctgctgtttttactgacaggaattgtacttggcggttttatcgggaacctggcttccgatataccgtggctgacctggctgaatttcggagaaacctttggactgaccgagccggttgtcctcaatttcggaattcttgttattaccttcggtcttacaatcagaatcacgatggcgagtattgtcggagtgattattgcagtcattacatatcgtctggtctgaagctgagacagcgcggctgaaagccaaactgtttcattgatggcggtggcctgtgcgcggagcgtgcggattatcgttccatatccttacactgtacttggagaggcacggtgaggaggagtagtgaaaagacgtacgatgaaagaactgccctattcggacagaccttatgaaaaatgtctggcatcggggccggagagcctgacggatgccgagcttttgtcggttattttaagaaccggcgcaagaggtgaaagttctctggagctttcaaaacaaattctggaactcagctatcccgcagggattctgggacttcttcatctttccctgccagaactgatggcagtcagggggattggcaaggtaaaaggaattgaattactgtgtatcggtgaattatcccggcgtatctggagaacactggtcacggaagaggcggtggttttcaacgaaccggccgttatttccggcttctatatgcaggatatgcgccatatggagcaggaagaactgcatctaatgatgctgaatacgaaaaatgtactgattaaggattctctgattttccggggaaccgtcaatatgtcggttgcctctcccagagagatgtttatcgaggcgctgcgctatcacgcagtccatattatcctggtccacaaccatcccagcggagacccttcccccagcagtgaagacaaaaagctgactgctcaggtaaaagaagcgggggctcttcttggtatccggctactggatcatattattatcggggataattcttatttcagttttaaagaacggggaattatatagctatgaagaacagcaaatatatcctggcagggctgtctgttttctgtgtcctgctgattgccgtaacatccatcaacagcagctttcttacgccgctgcgtaccggtgtcggatacttccttgtaccgctccagtcgggtatgaataccgttggtacaagcctttacaacaatatcagggactattcctccctgaaggaggcgcaggcggagaatgcaaggctcacgcagcgtattgatcagctgactgaggagaataaccggcttcaggcagaacagtttgagctggaacgcttaagggagctttaccagcttgatcaggactatatgcagtatgagaaggtggcggcccgcgttatcgccaaagactccggcaactggttccagattttccggattgacaaaggctcggccgatggaatcaaagttaatatgaatgtcatggccggcggcggactggtgggaattgtcaccgatgtgggggcgaattacgccacggtcagggccattatcgacgacgacagcaatgtcagcggaatgtccatgcgttccggggatacctgcaacgtatccggtaatctgaccttgtatcaggaaggacgtctcggccttgatcacatcaaaaaggactatgacatccagaacggcgacaagattatcacatccaatatcagtgatatctttcttcccggtcttttgattggctatgccgccgatttgtccaccgatgccaacaatgttacgaaatcaggtttcatcattcctgtagcggaatttgacaacctgcaggaagtactggttatcacccagctgaaaaacgggggagaagaagatgcgcaaagtactgattaatattatacttctgatcctggcatttacgatccagatatgtgtgtttcctcagatcgcctttctgtcttcggcgccgaaccttcttctcatttccgtatttatatgcgggttcattgagggcaaggaggccggcatgttttacggcctgatagccgggcttttcatggatcttttttacagcggtccttttggcttttataccctgttttacatcaatatgggatacctgaacggaatctgcacaaagtactattatgaggactatattacactgcctcttgtgctgagcatcgtcaatgatctggcatacaatatgtatatttatatattccgtttcctgatcagaaacaggctgaatttcggccattactttattaaaatcatgattccggaaatcatatttacaaccgtaaccaccctgattgtttaccgtttctttctttttatataccgtaagctgaaggcgtgggagcaaaggagagacaagaatcttgtttgatgacctgaaagaatttttaaaagaattaatcaaaaaagtggttacctcccgtcttttcgccctttccgcagtcttttttattatgttctgtgtgctggtcggcaggctttttaagttgcagatcgtcgagggagaagagtatcaggatgcctatatagccctggctgaaaaagtcattaagacagacagcacaaggggcaatatttacgacagaaacgggaatgtgctggcttacaatgagcttgccaattccgttaccatacaggatatcggagccttccgcaaggcgagccagttcgattcggactggaacaggatgctttacgagctggtgtcgattctgaacaaacacggtgaaaccgcccagggaagcctagaacttatgatagaccacaacggtgaattggcctattcaacaaagtcggaggctgccagaaagcggtttttaagagatctatacggtaagaaaagcgtggatgaactgaccgataaggatggcgatgctccggcagacgttacggcagaagaactgttcgataagctgaaagtacagtacaagcttgatgaaacgaaagataagaagggcaatctcattgaaattccggatgaggtcgcgcttcagattatcaatatccgttacaccatgcggttcactgcttatcagaaatacgaaacgaccaccatcgctaccaacatcagcgatgagacggtggctgatatactggaacactcggcggatcttccgggtgtcgatatcgaggaatccacaaaccgggtatataacgaaagcttgtattttgcaccgattatcggctataccggaaaggttaccacggagcgtctggaggaactgaagcaggtgaatgacgactatgagttaaacgatgtcgttggcagaaccggtattgagtcttccatggaactggagctgaagggacaaaaaggctcccagacagcttatgtggataatgtgggaagaatactgacgataacagatgaggtacagcccgtggcgggcaatgatatctggctgactctggatttaaaccttcagaaggccatctataacatactggagagacagctggccggtgttcttctgaaaacaattgtaaacaaagaggctgacgaaatcgtttatacggactcgtcaaatatcaagcttcccattaaggatgcctatttccagcttattaataacaacgtactctccctggaacagtttgcgtcggacgaagcctctgatgtggagcgccagattaatgcaaaatatctgaacgccagagccaggattgaaaacgacatacgaagcgagctgttatccgggaacgccactctgatgcgtgatctttcggaggagatgcaggcgtatatgatttatatttatacctacctctccagtgatgaggccggagtcattatcaaggattccatcgacacgaaaagcgcagagtatcaggcatggaaaaacaatgccatcagcctccgggattatctctattacggtattgccagcaactggatagatacgacgaaactgaacatcaccagtaagtattccaatgccgacgatgttttctccgccctagtggattatgtgttccagaatctggccgatgatacggagtttacaaagaagatttaccgctacctgatcaataacaacgtggtttccggcaaagagctgtgcctcgccctgtattcccagaatgttctggcctacgacgaggcggaggttaaccgcctccgtgccagcggggatgattatgcgtttgaatttctgatgaacaaaatcagaaatattgagattacacccgcccagcttgcactcgatccatgtacggccagttgtgttgtcaccaatgtcagaacaggagaggttatggctctggtcacatacccgagctatgacaacaaccggatttccgacccggaatattttgcccagctcaatgccgatcagtcgctgccgctgcgaaacaacgcaacccagacgctgaaggctcccggttccacctttaagcctatcacggccattgccggactggaggaaggggcaatccggattgatgagaccatcaactgtaccggcgaatacgaggaggccaatccgccgatcaaatgctggaaatatccgggcttccacggccctttgaatgtaatcggcggtatagagaattcctgtaactactttttctccgaactggcacacaggctgtcgctggatgcggatggaaattacaatccggataaaggtttggaggtactcagaaaatacgccacaatgttcggcctggaccagccgtccgggatcgaaatttatgaggccaatccggagattaccaacaaggacccggagcgttccgccatggggcagggtacgcataactatgccaacgtacagctggcccgctatgtaacggcgctggccaacagaggaacggtatttgatttaagcctgatcgacaaggagaccgattcccagggcaacctggttaaggattatacgccggcggtccatgcccagctcgatatcgcccagtccacatgggacgcggtgcagcagggtatgagacaggttatcacaaacagcagtacaaagaaaattttcaataacctggatgtcagcattgccggtaagacaggtacggcacaggagtcggacaagagaggaaaccatgcatttttcgtttccttcgcgccttatgagaaccctgagattgccgtcaccgtcaacattccgaacggttattcctcatccaatgccgcaatggtggcaaaacacgtataccgttactactacaactataccacacttgataatatcatgacctccggagcgctggacgcatccaatgagaggattaacggagactaagaggtgagtgtttcatgcaaagttccgtagttatcaagggcagcaaggccggaatgacggtcatactgaatccggatgtgccctttgagcagctaatagaagacataggaaaaaaattcagggagagttcccggttctggggttccattcagatgactctgaccctggaggggcgtacacttacaccttctgaggaatttcagattgtggatgccatcacggccaattcacagattgatatcctctgtatcctggataccgatgccaaccgcatcgccaaatgtgagaaggccctgaccgaacgcctgatggagctttcctcccagacagggcagttctataagggcagcctgcagaaaggcgatgtgctggagtcggaggccagtatcgtgattatcggcgatgtctgccacggcgcacgcgtcatcgcgaagggcaatgtgattgtactgggagtgttaaatggtacggtccatgccggagctgccggggcaacgccgtgatcgtcgcattcgatatggctcccacacagcttcgtattgccgattactgtaccagggcagaggaaaaaggaaagcggctcggccggggacctatcattgtttcagtggaagaagacagtctggttgtccggccaattaaaaagagtttcttaaattatttaaattttatttaatactggaaatatttctgattttagagtagaataatagggtaaactgaatacaggaggatgttcaaatgagtgaagtcattgttgttacttccggaaaaggaggcgtcggcaagacaacgacttccgcgaatgtcggaacaggccttgccatgctgggaaagagagtcgtattaatcgataccgatatagggctcagaaacctggatgtggtcatgggactggagaaccggattgtatataatctggtggacgtagtggaaggcaattgtcgcatgaagcaggcgcttattagagacaaaagatatcctaacctgtttttactgccgtcggcacagacgagggacaagtcaagtgtcaacccgtcgcagatggtaaagttagtagagtacctgaaagaagattttgattacatactattagattgcccggccggtatcgaacagggatttaagaatgccgtcgccggagcagacagagcacttgtcgtcaccacgccggaagtatccgccatccgcgatgcagaccgtatcatcggccttctggaagccgatgccaccaaacgtattgaactgatcatcaacaggatacgaatggatatggtacaccgcggagacatgatgtcggtcgatgatgtgatggatatcttgtccatccctgtcatcggaaccgtgccggatgatgaggacatcgtcatttccaccaatcagggtgagcctctggtgggaatgaacggatatgccggtcaggcctatctgaacatttgcaaaagaatacttggtgagtcggtaccgtttatgaatctggaaaacagccggaatatatggtccagaataacctgtctgcttaagcgggcttaagggagggactgtatgatgcatttagtggagctgtttggccggaagaattcaggcgaaatcgcaaggcagcgcctaaaactattgctggtttctgatcgggcaggctgctcgccggaactgctggagatgatacgcagtgactttatccacgccgtctccaggtatatggaagtggatacaaacgatctcaccgtatgcgtcatcaggagttcaactgatgaatacaagggaaaagtacctgcgctgtatgccagcataccgattcgcgacttacagaataaggggccatttacagcatgatattcgattacaactttaaaaattacaatttccgcataattttttatatgctggctctcagtacactcggtgttctcgtggttgccagcgccagcggacaggaccgggcgactgtactcaagcagatcgtcgggtagcgatagcactggtcatatgcatcgtcgtttccctgattgattatcacaagtattttaaattcagctccattatatatgtgggctgcgtttccctgctgcttgccgtactgttaatcggaaaaaatacaaaaggagcaaccagatggctgcgaatcggcggtatacagatccagccctctgagtttgtgaaaatagggcttattgtgatcctttcctggtttctgtcaaagaatcaggaaaggatcaatgcgccgtccgttgtcggaacggcagcgctgatgtgcgccgttcctctcggaatggtctatatgcagccgaacctgtccaccaccatcgttattgcttttacgcttgtctgcattgtgtatgccgcagggctcagttataaatggattgtgggagtactggctgccggaatcccgcttacgggactctgtctctacctggccctgtttgatatggtaccgttccttaagaagtatcaggcacagcggattctggcgaaaatatttcacagtgacagccagtatgccgatttaaaccggcagcaggataattccattatggccatcggctcaggacaactaaatggcaaggggttatttaacaataccctgagttctgtcaaaaacggaaatttcctctcagaggaacagaccgatttcatctttgcggtaatcggggaggaactgggcttcatccgcagtgtcatagtgattcttgtctatgctctgttggtttatgagtgtctttacattgccagccgtgccaaagatacggcaggcagacttatttgtaccggtatggcggctctgcttgcttttcagagcttcgccaacatagctgtggcaatgggaatattccccaatacgggactgccgctgccgtttatcagctccggtatcagttcacttctcagcatgtttatcggtatgggaattgtcttaaatattggacttcaaagaaaaagcagcaatcattaaggaggcaggttatcgatgaatataggattaatcgcacacgattcaaagaaaaaactgatgcagaacttctgcatcgcttacaaagggattttagccaagcattctctttatgcgacaggcacgacgggcaggctgatagaagaggttacaaacctgtccatacacaaatatcttcccggtcatctgggaggatctactcagcttggttcacagatcgagcataattccattgatctcaccatatttttaagggatccgctgtcaccaaagtcacatgaaccggatgctgatattgttatccgtctttgcgatgtacacaatattcctctggccaccaacctagccacggctgagctcctgatcaagtctctggatcgcggcgatatggagtggcgcgagatgtataaatagaggtgcgccattgaaacgtataataatacagagctccgttctgcttgcggcagcagcgctttcactttcagcctgcggtaaaaaaggcgggctggaggaagcttattcatatgaagaacgatcacagctaatgtccgcacatgggggcagtgagctggctcctcttttcgcggaggatctgtgcgtcgtcacagacagtcaggacggggatacatccatgaatgcggaggccggagctctctttaatgttacagaccgctctgttgtctacagtaagaatgcattcgaacggctgtatccggccagcactaccaaagttatgactgccatcatcgccctggaagaggggaatctctcggatcaggtgacggtgacggaggatgcggttataaccgaggcaggcgcttccctctgcggaatcaagccgggagacgtgattacaatgcaggatcttctctacggccttatgatgccgtcgggtaatgatgcggcgaacgccattgccgtacatatgtatggtagcattgacgcgtttgcagacagaatgaatgtcagggccagggaactgggcgccacagggacccactttatgaaccccagcgggcttactgacgagaaccattatactaccgcttatgatctctatctgatgttcaatgaagcgatgaagctcccgcttttcagagagataatcgctgaagattcttacacagccaattatcagaacggcgccggggaagccgtatcgaaaacctggactgtggggaactggtatcagaaaggagaacgtgaaacaccggccggagtcagcgtcctcggcggaaaaaccggaacgactcaggctgcaggatattgcctgattatggcctctaacgacagccaggataaagagtatatttccgttgtccttaaatcagacagtcgtccttccctctatgataatatgacaaatataatttctaaaattgtcaattagtgattgcgctttttatgaatttatactataattatttatagattaaatgactttttatacaacttaaataaaaaatccaaggaggagattgttatggttcagattattgcgggaaataagggtaaaggaaagactaagtatttactggacatggcgaatacagcagtaaaagaatccaagggttcgatagtttatcttgacaaaagtgcaaagcatatgtatgagctgaataataagattcgtctcatcaacgtacaggaatatccgattacttccagtgaaggatttataggttttctttgcggaatcatctgtcaggatcatgatctggaacagatgtatttagacagcttcctcaagctgtcctgcctggagggcgaggatatcgaagcgacctaccggacgctggagactatcagtgaaaaatatcatattacatttgttctcagcatttccatggacgcagatacgttacctgagattgcaagaccaaatgtggttgtttcgttataaatgggtaacttacagtaccttcatacgttaccgcttcgcgatgcgcaaaaacagcggaaaactgtttcgtgccgtatgagcagttacattaatggtacataacttacagaagaaagagtgctgcggccgcggcgctctttcttttgcttgaattttttgacaattactcttataatacaaaggaaaggagaacggcattacatcatggctaaaaacaaaaaagttatccgctataaaaaaccactgaacataaacgttggcatgattatttttgccatgatattcgtttatctttccttcagtgtttacacgtatatccgccgcgataagatacagttctatgaagtggtcgagggcagtatcgtaaatgacaagagccacacagggattattctgagagaggagaccgtcagacaggccgacaggacaggctttgtcaattattacataagggaaggcaaacgcgccgctgcgggcgcccgtgtttattcattggatgaaacaggacagctgggcaaatttctggaggagaaccaggaaaacgccgcccctctctccgatgaaaatctctccgaactgaagaagcagctcagctccttctgcctctcttacagcgacagccgcttcggagctatttatgatgagaaatattcactccaggcctccgtggcggagtatatgaacttcaacgcacttgacggtatggacgagctattaaaggaacgggggattaattaccagcaggtttatgcggatcagcccggtattgtttcttatgcgatagattcctatgaagggatgaccgcctccgatatctccgaggcatcctttgaccgcacactctataaacgctcctttggcaaagcgggagatttaatcgagaacggcacgccggtttacaaactgatcacctcagagaactggtccgttgtgtttcctctcagcgaagaggatcagacggcctatgcagacagaaagacgctacaaatcaagccggcaagcacggatttctcgatgcggggttcctacagccagatcacgggaagcgacggaaagctttacggcaaagtagattttgataagtttatggtacagtttgcttccgaccggtttatcgattttgaaatcgtgtcagatgaggcagccggtctcaagatccctgtttcatccgtaacatcaaaagagttttttacggttccggtcgattatctgactcagggcggagacgccaccatgtcggagtccggcttcttaaaggaagtctattcggaatccggagaatcctccattgtatttacaccggccgatatatataattccacggaagaatattattatgtggataaaagcgattccggaccgtttaagagcggagattatattgtaaagccggattccagtgagcgttatcagattggtcctgtcgcaacgcttaagggagtctacaatattaacaagggctatgccgtgttccgtctcatatcggagctgacgaataacggtgaatattacataatagaaaaagggacaaaatatggtctttccgtgtatgatcacatcgtacttaacgcctctacggtaacggaaggacagattatataccaataacgctgggaaaggtgtgtcagaatgatcagagaaaatttaaatgatgtaaaagaaaatattgtttcggcctgccgggcttcgaaccggcagcctcaggatgtaacgctgatagctgtcagtaaaacaaaaccggtggaacttctcagggaggcatatgatgccggcgtccgtgacttcggtgaaaataaggttcaggagattcttgaaaaggcgcccgcacttccggatgacatccgctggcatatgatcggacatctgcaaaagaacaaggtacgccaggtcatcgataaaacagtcctgatccactccgttgatacagtggctctggctgaacagattgaaaaagaggcggccaaaaaaaacattgatgtcgacatccttctggaggtcaatatcggggaagaggaaagcaagtatgggttcagggccggcgaagttctggaggcagttaccattatttccaaattctcccatgtacacataaagggactgatgacaattgctccatttgttgaaaattctgaagaaaatcgcgatatttttctaaaattatatcaattaaatgttgacataaaaagcaaaaacatcgataatgttaatatggctgtgctctcgatgggaatgaccggtgattatatgacagcaatagaagagggcgcaaccatgattagagtcggtaccggaatctttggtgccaggacaaagatgggagagaatttagtatgagtattctgaacaaactaatggatacaatgcgtttaacagaagaagacgatgaagactacttcatcgatgacgactatgaagatgagaaacctgccaaaaagcggttatttaataaaaaagaagaagaagactatgactatgatgaggaaccggagccaaagccccgttttctttcacgttcctcaagcaaagtagtccctatgaggagggggatggaagtgactctaataaaacctacctccatggaggattccagggagatttgcgattatctgctggcaggaaaagctgtcgtcatgaacatggagggcatccatatggaagtggcgcagagaattattgatttcgcatcaggcgccacgtattcgatgaacggaaacctgcagaagatttccaattacatatttattgcaacaccagaaaccgtagaattatccggcgatttcccggagcttttagctgacggctctttgaatatttccggaatgaaccttcacttttaacattattatgcaggataaagacgaacaattactgaaaaagcgtatatcggagctggcggcgctctgctatcagcgtgatatacggtcatataccgattttctgacgttaaatgaacagacaattttccattccatgaaacgtacgcttcctcctgtcacctggctgatgggcggaggttatgagactgccgaacggaaaattgtttgttttctgccgtcttatgaagatgaaacagccgatttaccaatcagtatactggaagccgttccggccagtccacgctttgcagaggctctgacacaccgggattttctgggggccattatgaaccttggaatatcgcgaagctgtattggcgatattctgatgaatgaaaacggctgttttattttttgtctggagaagatggctccctttttaatccaggagcttaagatggtgcgccacacccaggtcagctgccggcccgctacgcaggccctggcggccgctccgaactgcgagacggtgagcggaagcgtggcatctccgcgtctggacagcgtgatttccctcgtttttaagacgtcccggtcaaagaccctcccatttattgagggggagcgggtatttatagacggccgcctgtgcatctctcccggccggcagttaaaggagggagagattatatcggtccgcggcctcggcaagttccgctataccggcgccggaaatcagacaaagaaagggcgccttttcgtcaatgccgaaaaatatatatagtccgcaaatacatgccgaaagttacgattcgttttcgcgccgttaaactcgggattttcactcaaaatacgagtgaaaacacctctcggaatagcggctgtaacagtaactgcccaaatacggataaggagaaacgattatgaatggcaaaaatacatctgagaatactacagacagacttaccgtgcatttgaacggcgagcctgtatacgatattgttatgacacaagattttaacggcctgcaggaggaggtacgcaaacatgtctctgcttccggtaaactctgcattgtcaccgactctacagtgtcggagctttacctgagggaagtggccgaaatcctgtcatcctgctgcagcagcgtgatttcttatgtttttccggcgggagaggcgcataaaaatctgtctactgtccaaaagctctatgaacggctgattctggagcgctttgacaggagtgatatgctggtagccctcgggggcggggtcgtgggcgatctctgcggctttgccgccgccacctatctgcgcggaatttcttttatccagattccaaccaccctgctctcccaggtggacagcagtatcggcggaaaaacaggcgttgatttcgactcttacaaaaatatggtcggcgctttccatatgccgaaactcgtttatacgaatatcagaacccttttaaccctgccggacaacgagtttgccgcagggctgggcgaagtgatcaagcatggcctgatacgggacagggaatactatgactggctgctttcacatgccggtgaaattgaagccagggatctcactgtcctgagacagaccgtcgccggaagcaatttgattaaaagaaaagttgtggaaacggatccgacggaaaagggagacaggatgctcctgaattttggacataccctgggccatgccatcgaaaaactcaaaaattttgaactgcttcacggcgaatgtgtcgccctcggagcgcttgccgccatgcgtctgtccgagagcagaggtatgattacagaagcggaaactgagcgttttaaagaggcattaatgcgatttcatattgcggtgcgtgtttccggcctgacggccggcgatattatcgaggcgacaaagaatgataagaagatggaatccggagtgattaacttcatccttttaaaaagcgtaggctgtgcctatgtggatcggaccgtcacggacggtgagatggaggaagcgcttaagttcatcctgacacaggaggaaatcaatgaataaaaaaatacagcagtttctgttttttctcgcaggtctcgttgtcagcatcggcttcgaccagtggacaaagtatctggcagtcgtaaaattaaaaggaaagcagccgtttgtaatctgggatggtgtctttgaactgtattactcggaaaaccgcggggctgcatttggaatgatgcagggcaaacagggatttttctttctgatcgccattgccgtcatagctgttgtggtatttctcctgtttcgtatgccgtctgataaaaaatacctgccgtttaccggatgtctgttcctgctcgtctccggcgccgcaggcaatatgatcgaccgggtggcgaacggctatgtggtggattttttatatttcaaattaatagattttccgatttttaatgtggcagactgttacgtagtgatatccacgctgcttttgattctccttttctttttcgtttattccgacgaggaactggaatttctttcattcggaagacagaagaataaaaaatcggagaatggagaataacaggaaaaggagaatgcagtttgaaacaggaatacattgttccggaaaaaagctccggcctgcgaattgacaaatttctgactgaaagctgtcccgattatacgcgttcctttctccagaagctcttaaaatcagagctggtggaggtgaatggaaaaccggtaaaaagcagctacaaaacagcggccggcgatacggttactttcgaggtgccggaagctgtggaagcggagattacggcgcaggagatgccccttgatatcctctatgaggatgaggatgtgattctgatcaataagcccaaaggcatggtagtacatcctgccgccggacactatgaaggaactcttgtgaacggcctgatgcatcattgccgggagcagctttccggtatcaacggcgtcatgcgccccggcattgtccaccggatcgatatggatactacaggagtccttatcgtatgcaagaacgacctggcccataattccattgcggagcagttaaaggttcattctatcacaaggaaatattatgccgtggtattcggcagtctcaaagacgatgaagggacaattcacgccactatcggacgtcatccgaatgaccggaaaaagatgagcatcaacagtaaaaacggcaaggacgccgtcacccattataaagtgctggaacgttttcacggatatacactcgtggagtgcaggctcgaaacaggacgcacgcaccagatccgggttcacatggcaagcatcggacatccgcttctgggcgatcaggtatatggcccggcgaaacagcccttccgtttacaggggcagaccctgcatgccggagttctcggtttcctccatccgcgcacaggagagtatatggagttttcagcgccgctgccaaaatattttgaggaactgcttgagaaactgcgccgcttaacttgatacatccgcaatgcagcccgccgctttttggcgggggtgaagagtaacatttctggagggtacaaatgaatatttttgatatactgggtccggttatggtcggcccgtcaagctcccatacagccggtgcggtgcgtatcgggctggcggcgcgcaagcttttgggagaaccgccggtcaaagccgccatcactctgtcaggttctttttcttccaccggagccggccatggaacggacagggcgattgtcgccgggcttcttaacatggagccggatgatatgaaaattcctgaaagcttcagggaggctgaaaaagccgggcttgaattcggttttattcatgatacaatcggcggagcgcatccaaacacggctcttctcgacattttgtccgcgtctggccggaggatccggatgcaggcgtcctcgctcggaggcggccgtatcatgattaacaaactggacggtgtggaaatcaacgtaaccggagagcgtccggtgctgattatccacaatatcgataagcccggctacgtatccgaggttacgtctctgatggcctccggctcggtcaatatcgcaaccatgacgctccaccgcagcaaaaggggcggtgatgccgtgatggtgattgagacggatcagaacatcccggttgaggctgtgaggcaccttgaagccgttaagggcatctttaaggttacctgcctgaatctgtagatattttgtaactgttcatcttatcggaacggatacgatattgtaccccaaacgttactattcacagcctgtatcccgcgaggtgcttccgtgcgtattttgcgcgaaaatcacgagttacacggcgcgaagctgtgagtagtaacccttaaaccataacggcactgaagtatgccgtttatttctaattcccggaggttcaaatcatatggcatataaatcacttgattccattgtgcagtactgcgccgaacacggagcagcttttgatgaagccgtgctcgaggacgatatgcaggagagggacgtcaccagagaggactccttaagcagtatgaagtccatgtggcaggccatgaaggaagcggcctcttcctatgatccgtccctcaaatcggcaagcggcctgtccgggggacagggtgcgctgatgtcggcttatatggagcagggggatactctgtgcggaccattcattaattccgtcatcagagcggcacttcagatgggggaatcgaatgcctgtatgaaacggattgtggcagccccgactgcgggagcctgcggagtgcttccggcagtcctgattcccggctgtgccgagtttggttttgaggatgaaaaaatgatacgctccctctatgttgccgccggaatcggccaggtcatagcggagcgtgcgtatattgccggagccctgggcggctgtcaggctgagatagggagcgcatcggccatggctgccggagccctcgtatttttaaagggaggctcaccggatatgattttaaatgcagtggcaattgcccttaaaagcctgctgggccttgtatgcgatccggttgccggactcgtggaagtgccctgtatcaaacggaacgtcctgggagctgtcaatgcgctgaccagcgcagatatggctctggctgggattgtcagttttgtacccgcggatcaggtaatcgacgcgatgaaagaagtgggcgataaaatgcacgcttccttaaaggaaacaagtctgggcggattagccgcttcaaaatctgcacgtaatttgcaattttaataatgacttttcagaatttttgcgttataatagaggcaagaagcagaatagttttacaaattgaaaggagtgagatcgatgatgggtaatttagtaattacaatcggtcgtgaatgtggcagtgcaggacgactgataggacagaaactggcagcagatctcggtgtgaagtgttatgataaggagcttttaactctcgctgcaaagaacagcggtttgtgtgaagaactgtttaaaactcatgatgagaagccgacaagcagttttctctattcgcttgttatggatacatattctctgggatacaatacctccgcatatatggatatgccgattaaccacaagatctttctggcccagttcgatacaatcaagaagctggcggaggaagaatcctgtgtcatcgtaggccgctgcgctgattatgcgctggctgattatcccaataccgtcagcgtctttatctgcggcgacgaggaggataaaatccgccatctgatggaacgccacaatgtggatgaggcaaaagcaaaagatatcatgatcaaaacagacaaacgcagggccagctattacaattattactccagcaaacgctggggaagctgtaagagctatgacatgtgcatcagcagcagcgccgtaggctatgacggagcagttgatataattaaggaattcgccaaaaagaaacaagaatttcttaaaacaaagaattataagtaactgatataataagaccggtatgcctgtttgttttgaacaggcgtattggtcttttataatgtcaataacttaactagaaaagagttaccccaatgagaaagttccatccactgataacgagaatcctggttatgactgcatccgggtttctgcttatttcaattgcaggatcctatacgccggctgtttcaccagcgccggaacaggcaattcgtatttctcatgttaatgcggcggatatatcacagtccggctcgctgcctgtccggattatgaatctattaaatcaatttgccggtaattcagcctcctatctctcagggctggattcgaaaacggaggaaacctattctccttccgtttttaagtataatctgatggcgctctatcccgatgagcaggagatatccccggaggatgagacggccacgcagcaggagcgcgttatgcgcctgctgaagtataacctgaaaccattctacgattttttcaagctgtcctttcatacaagggcctctgattcctacggcggacagatgtatgagtatctgaaccgtaaagatgcggaatggacatccgagctttaccggtggctgcaggcgtcgccagagcaggccgctaaaatgctccggcatccggcatcctccgtcaccggtaagtacgatccgaccaacaaagcccacgatccggccaatccggctacgtggctgatcccgtcgtggaaaaacgtctcttttcaattttacgatggagacggcaaaagtatttccctctattccaacgcacaggaaatcgcttccatggccagcgtttacacctggtttaccggatggaccgatgtggataacttcaaaagctatattgatgaattatggcagttatcccacggttacagcgtgacagtcggtgctgtttattattgcgacggctgtgtggatccgaatgatgcggaatcagatgacgatgcagagacggaacccgccttatcagcgtcctcagagacctccggtgaaagtcaggcggaaattccttcagatgtcttgccggaagggcagaatggggcatctgaggcttcacaggaagcggctgcagcccaggcatcaccgtcagagctgtccggtccctccgaagataccgccgccgcggcaggagagcatgcagtgggcggccaggacggtgaatccgatgctgttccggcagccgaggaaacgcagatacagctcaacgaagaaggaaaattttgtcccggccatgtcgatttgaccatcacggcccgtattaccgggctttcagaacagaaaaacctttttaccctggataagagaggccacatgaagacagaggcctggaacggatggtccgattacggcaaagcctatgtcaaccggctgaacagccaggactgggcgcttttatataatctgtccccaattgaactggcactcggaaagccgctgacctttacggagatcagtgagtatctgaaactgcttcccgacgatatatcgagggagagaaaggcagtcattacatacgccctgcagtctgtcggcaaaattccatactattatggaggtaaggcaaaggcgccgggttacgagggcaataattttgccgttattaccccgcccgacagaaaaggacgtatcatatcaggactagactgttccggatgggtaaactgggtttactggtcttcccttggaaagatcccgactaatctcggcaccagcgggctgatttatgccggaagggcggtaagccggtccgacttaaaaccaggcgacattatcataagactgggggtaaattcccatgtcgtcatgttcctggcctgggcgccgaacggtcagatgatatgcatccacgagacaggcggaagcgtcagcaacgtcacggtcagtgttatggatgcaaactggccttattaccgttctttattagattaagataacacgctttgctttgcatcattttattgtttatgataaaataagagcagagtaaacgttactgttaatcatatttcatcagaaagaaggtatgttccatggagaaagatattttaagcttcgcagttgaaaaaactcatgagttaatcggtgcgccaacctgcagcagcgagacaaaagctgctgccgaggcatggctgaatgcggtgggaacagagcaggaggcagaagaaacaaaaaaatatattgatgaacttgaggcggatatcatgccgattgacaatttgatcagctttgcgggttcggaggccggagctgcgctttttggagccgataccgctgccaatattgcagttcatgcaaaggaaatcaaagctgccggagcgaagttctgtgactgcccggcctgtgcggctgttgaggcaattcttgagaaaaaagaagacatacttaaataaagaatcaatacgtatataaacttccgtgaaaagtaacggcaagtaattaaggcaacgcaaaatatattttattgaagtgcggagcaatccggtatcaaaagggtcaaaagaccttttgaccccaacatcatatcattcggtacgaaaaggcatagcctgcgttcttggactgagcgcaggctatgcctttttgccgattcagaagaaggagtaatcagaaatgaatagaaatcctgataaaaagaatggaggaaatccggcttatttcaatccgatacaaaacggtgaatgaaacggcagcaaagcttatgcagatgatcgtcggattgagttgctgagtcgcttcttaagtgttataatattatcctatttcggatgaaatgttccgaatgatttgcccgtatatttaaatattaacagagaaggacacagaccatgataaacagagaagatatgctggagcttacaaggcggatgacccttgcccgcacttccttcacaaggattgcaggatgctatgtggataaggatggtgattttgatgggagttttaatacaaattttctaaaactatcgtcaccggaacggacgaaaaagcttgcactggcaaaggaaatcccgttttcaccgacaaatgtaaacctgaagaaatatgaatttccccaaagtgtccgcaaaccgggcagcatgtggcagctgcttatggcaatgaaagagtgcggtctgaaaaatgacgccctgatggatacattttatgatattgtcatggagaaatacaggacggataaagaatatgccattctggtatttcatgatcgtttcgacattccctcaaaggcttccgataaagaaaggctgtgggaatcggaagaggtatttgaatatatcatttgcgctgtctgcccgctgtccggcgagtatgagcccggaaaaccggaatacggatttttgttccctgcctttaccgacagaagcgcggatctgaaccatattgatatattccagatagatgcaaaaaggccgcacaatgaactgctggaaactttgggagtatgtcccgaaaaatagctgattttgatgaatttcatgtccgggaactgcctgagtttcagcacaacatcggaccgcacaaaatgtcaagagaaaacctccttaatcctttaagatatgtatatacgcagcaacagttcagacaggttttcacacgcggtaacattcttgccggctgaattgtgacgatgcgtaacgcagggagaggggaaaggagaaagatggattggattacaggtatacagaaagccattgactatgttgaggcacacatcacagaaccgattgattatgaagaagctgcaaaacgggcttattcctcaagctttcattttcaacgtgtattcagtattctgtgcggatttacattaggtgaatatatccgttggagaaggctgtcgctggccggaagcgaattgcttcaatctaatgaaaagattatcgaccttgcaatgaaatatggctatgatacaccggaaagcttcagcagggcattcacacgatttcatggaattgctccgtcacaggctaaaaacaacagtgccgtcttaaaatctttttcccgtctttccgtaaaacttattttaaacggaggtaatacgatggattacagaattgagacgaaagaggcatttaaactgatcatgaaaaagaaaaaggtttcccgcagccaggaactgacagcagcagagattggggaattctggaagaagtgcggttcggacggcacgatagaatctctctgcaaatatattccggaggaaaatatttttaaagactgcattgtaggagccagcttcggcaaagatgccactgatgaggaattcccgtatgcaatcggtgctatgtacaatggtttaccggtggaagaggaagatttaatcgtggaggagatacctgctcacacctatgttgtattcccatgcgtgggaaagatgccggaatcgttccagaaactgtatcagcagatttacagtgaatttttcccatcaagtgaataccagccctgcggaggaaccgacttcgaggcatacccgtcggcagatgtctattcaccggattatcattgtgaagtctgggtcgcggttgaaaagaaataaaagatagaaaaacaggcgctgtgcttatacatgacgcctgtttttcatctgcggccaggagcttattatataaatataaaaattaatttcttcaatttgattgatttttatataaaacagtagtatactgtcctatatccaactattcgtgaaagtctactttatcgaatagttggacaataaaacctaccaaggagcattcttcttatgaaattacagcgattactcagtcttacccgtcaggccgtggatgattacgctctgattgactctggtgacaaaattgccgttggtatctccggcggcaaggacagtctgactttattatatgcattgcatggacttaaacgtttttatcctaatgaatttgaattgtctgcaattactgtagacctcggttttgaaaattttgatttatcaccggttcgatccctgtgcagtgaattatctgtcccatttaccgttgtaccgacggatattggtaaaatcctatttgaaaccaggaaagaatcaaatccctgcgccctctgtgctaaaatgcggaaaggcgccctcaatgaaacggcaaaacaaatgggctgcaataaaatagcctatgcacatcaccgtgatgatttgattgaaactatgttattatctttaatttatgaaggccgcttttatgcgttttctcctaaaacctttctggaccggacggaacttacggttatccgtccgatgatttatgtatctgaagctgatgtaattggatttaaaaacagattttcacttcctgtatgcaaaaatccttgtccggtggatggaaaaacgaaacgcgaatatgttaaacaattaacaaaacaactgaatttacaggcgcctggggttaaggaacgccttttccatgccattaccgaaggaaacattgaaggatggccggataaaaaattgccaaataatgcgaggtgaaaataatggctgctctctcctatcatgaacaggaaataattgagaatacaaaaaggctccgccagatgttaaaggaactgccgcccttttgcgctgatttcttcagaggaattgaacccaggacttcttcccggaccagaattgcatacgcttacgatttaaagacattttttgattttctcagacaggaaaacccgctttttgccaactgtgaaatgcgtgacttctctctcactgttctggatgaaatccaggtgatggattttgaagaatacatggaattcctgaaatgccattccacggaaaaaagggaagatttagttaatacagagcggggaatcatgcggaaaatcgcatcattaaaaagcttttataattatttctaccgacacgaacgtattaagaataacccggccgcattagttcagcttccaaaacttcatgaaaaggaaattatacgtcttgaggtcgatgaggtcgccagccttcttgaccaggttgaagcaggtgcgcaactgactgaaaagcagaaggcgtttcatgccaaaactaaaatccgcgatcttgcattaatgacactcctgcttggaaccggaatacgtgtctccgaatgcgtcggcctgaatataaatgatgtggattttaatacgggcggcatcagaatccaccgaaaaggcggcaaggaggtcatcgtctacttcggcgcggaggttgaagatgcgctggccgattatatggcagaacgtaaacacatcactcccgaaccgggacatgaagacgcactatttttatcccttcagaaaaaaaggctcaatgtacgaagtgttgaaaaccttgttaagaaatatgccaaaattgtaacccctttaaagaagattactcccataagctcagaagcacctacggcacgaatctatatcgggaaaccggcgatatttatctggtggcagatgttctcggccacgaagatgtcaacacgaccaaaaagcattatgctgccttagaggacgaaagacggcggagcgcacgtaataaagtgcaattaagagataaatagtaacaataaataacattctctcccttccggcccttcatgtggttttcatccggcataaaagcaaaagtgcatcgggaggcaggggcatggatacaagccgctctgcttcatgctcctccgctcccagatacaatgtttctgaaatcagcggtctctcctcacaaaattaccgccttcgtaaattctcaccggattccccctctccagccggttatgttccagccacgccagttctttttccttccttccgctctccatgttcctctcggctaatatgtcacagagacggttgactgccagttttttattcatatgctggctccgtgcttctgtggataccactgaaatacctgtgggaatgtggataacgcgcacgcctgtttccactttattcacattttgtccgcccttgcctccgctcctgaatgtttcaaagcgcagcttcagctcctgcgtcagcttaggcatattttccagaatgctcacatctatataccagttcttcctcttatgctttggacggtatggacttttgcagacccagagtatgcttccctcaagactgctcatatcttcttccgtctcaaatatgacggaggaaaagcccttcgccttacttcctctgacgcattgtaccatccttatatctcctatttccttttgaagctgcctgtaaaaaagctctgccgcaagttcgcactctgccgggccctggccggaactgatttgtattctcattttccccacctaccctttataagtaatcagcggacgcagtgtggcagccacctcgatcaatccgaattcctgaagggatgcgatgacctgttccacattcttatatgcctccggcgcctccgcaaacagcagattcgtgtcatggcataccacctggcttttgaacttagtactgcgtatggaattcctgtcatatttgcggtcaatccggcttttacagacgctgcgcgcccattttcttccggctccgtgtgaaagggaatccagggaaattccggtatcctttcccggaacacacacataggtcaggctgcctctggaacccgggataaccaccgcgccgtgctttgcggatacgcttccctttcggtgaagccacccgtcttcggtctgttcaaggtaattatgacagatttccatcaaaatatccagctgactgtccgtgttcagataatccagaagctttccggcagccgccagtctgttgcgccccgcccatttaagtgcatcatcatgagctgccagataggccgcagcctgtatggaatcttcctctatcccttccggtctgttatagcgggaaaggatctcctgtccgtaacctctggaaccggaatggaccagaaccaagacgttttcgcctaaaagtcccattgcctttgcggcagactcatcatatacctgttccaggcattgaaattcaatgaaatggtttcccgaaccaatagttccaaaatcgcgtatcgggcactcttcctcataaggattatcacagggatatctcccagttcccggatagaattaagccgtgtgacccatttttccatcttaaaccgttttcttcttacctgtgtggaaaaaaggctcatgccgcagccaatatcattaccaattaaatgaggataaaatcttccccggctcaaagccgccattcccacaggcgtgtttcccggatgcagatccggcagtcccacggttcttatcattcccggaagtctgctgacgcctcttaactgatcgacagccgcctgttctacccaatttttaccgctgctgattaatatgcaattttcatgattattcaaatcgtatttctccttcataagctgacaggctgtgaatggcatactaaaaaaaggtacaaaaaaacacgacaacaagccgtgtgcaataaaaagtatacaccagtccctgtctgatttgcattgttattttgttctcaccatactcctatcatttgccaacataacaaccaactccttttcttatgaagaacttacgtcttcttattctgaaatttactataagctaaaatccggaaaatgtcaacttaaaagtttgtaagccgtgatttcaccgtgtatcactgtaacagctgatgctgcctgaactgtgacgggaaactgatattgtccccggtatcctgcttttcattttcaggaaccggaaacaatgtcagtacctttaagtcattgtatcatcgcgcagggcatcggataaattttccctgagaactcttttaccgccgatataatatgccagggccacaaagctcacaatagccaggctgaagacagcaattgcggcggcaggaacctccggccatacctccgccggattcaaataactggctttagcggtaaatacaataaacaaataagtcaaaggcagggtgataagaaccggacgcccggcaataaccagcacttccgcataaaacatctttcttatgccggcaggcgtcatacccacagacatatattgggcaaattcccgccttctctgacgcataaatccaagcgtataggaaaacacattggcaatcccaatcatcgcaagcagagaacagaaggctcccataaccagcttatagctgtctatgatggaatcattcctaatccgggccttaatgcggttctcagattctatctcataagaacgtccaagcatctgtgtaatctgtttctccagtagattcagttccgcaagggtaacccctttcccggctaatatccggagatttgtatctgcttcggcagttcctgtcttccccttcatattatgccacaatgacacgggaatgaactgtacaagagaataatcggcatactcttctcttaaaaccggcggaacctgcgtatagccgagtacagggatttcttctgtgtccttgttcccggaattttgaagtactatggtctcctggtcttcccttatatatggaacatactgcctgtaacgaaaaacgctgtttatactatcccatatccggttcaatattatcgtcccgtcaagccccggcgtgatacaggtatcctcacagtaccttataaatgccgcatcatccataacaataaccggagcccttacctgccatacgccttctgactcagatacggaagcgccggcaaccgcagcaaggcctccaagtgccgtaagctccggactgacggcatcctttggcacctgaatgagtgcctctgccttctgatatgcgacggcatcacgtacttctgccatcccctccagtgcctgtgccggcccggattgccggaaatcttcaattttggtatcttttattgttatcataatatcccagacatcctgataacgctgaaaataagtgtatttggtgttgagatcggtaagagagaaaaaacacagcatcattgtaaaccccataaatgacaaggtcagagacaatgtggaagtgcgcagcgctttcctttgcgccttcagcgcatttcccgccagttccccctctgtaccaaataaaattgagagaattggagaatgcctttttctcctcagccctgttacacccgttcccctgattgcttccaacggcgtcatcctgcttaattttccggcaggaagccaggcagagaacagcacggttaaaactgacaacaatacagcaagaattaatactaaaggatggtaatgaaaaccaatgggcaattggcccggcatgccggccgcaatgtactcaatccctctctttgctgcaaaactcagcacaattcctataatattacccgacagtatcggcagtgcacaaagcacggccgcttcctgcatcaggcaaatccgtatctgtaccggcgtagccccaatgctggataatatgccgaactggtgtactcttgcattcattgataccgcaaaagaattatggataatcagaatcagggacagggaaaccaacgacagaatcacaaggtaaagtgtcagcaacagcggaggtgtctcatcctgcgggtcatgaatcaggtatctggacaaaagaagtgtatggcaggataccgccttttcatctaatcccagccgttttgcgatcattggcatgtccttgtaaacagtcctgacattgtggaaataaatatcagccacgataccctgttcaccggataaagcttcgttaactaccgctttttccacattagcaaaattctctattgtgagtaagtcccccgcatccgttactccggtgagcctgccctgccagtccccttcctccaaaacaatcttttccacttcataaacccatacattataaaacatgctgcacagaaaagataaaaacaaactggatataaaagcggccaccatgatggatatactggatgcacggttgtttctgataaaccccacagaataatctttccacattatctgccaccccgtttctgatcacggatgatacgcccatcctctatcgtaacgatacggtccgcttccagcgcaatattttcatcatgcgtaatcaatagtatcgtctgcttcaggttgcggttcgacagctttaacatatccataatttccttagaatttttccggtccagattaccggtaggctcatcggccaaaagcagcgccggacggtagattagtgctctggcaatcgcggtcctctgctgttgtccccggataactggtttggaagtgcttccagtttatcagagagacctaaggaatttacaacctcatcaaaatattccaggttcggtttctttttatccagtaaaagcggcatcagtatattttttttgacagtgagcgtagggatcaggttatagaactgataaaccagtcccaccttcctgcgcctgaatatggcagattgcgccgggcttaaagaagagatatccctccctccaccactactcttccctccgtaggtttatccacactgccgagaatatgaagcagcgtagatttcccggaaccggatgcgcctacaatcgcaacaaactctcccttgttgactgcaatattgatttgttccagagcaactacccggttatctccggacccgtataccttatttaaattctcacatcttaatatttccacacatcttctcctatcctgttataatacttaatgcagtttcattataacaggccaaagtgacagctcagtgactgtaaaagcggatttcaaaacatcctccgccatctggaatattgctggcccgtatcgtgccgttttgacgttcaataatttctcttgcaagggaaaggccaatgccgataccattctttttagcattttggccacaataaaaccgttcaaaaagatgggggatatcctctctttgaaaccccttcccctcatcccagatgagtatttccgtgtaaagttcattttgaccataggagcaatggacagttcctccagccggagaatattccatgcaatttttcagcagattcatcaccgcttccattgtccagtctaaatcagccgtgatttccacttcacccgcttcgggatattcagcgatacatccgcttcggaaaatacctcctgcagattgtcggcagccagagtaagaacggtgaagacatccacagcctctttctccaggaaaagggttccggcgtcaaggcgcgacaggagcagcagagactcctccaagtgtatcagtctttttatctgcttttgtatttgtgcaggataattcttatccggatgtgtctccatcatctgggctgaaagtgaaatggccgttacgggagttttgagctgatgggcaatatttgacagattttccgcaaaattttgtttttcctccagtgcggactctcttgtctgatgcatcattgtaactgttttatatatctcatcctgcagttttgaaaaactgtcttcccccgcctccaagacgaggtccggactgccggaattgattttttcaagcgcttcggccattgtctgtatacgcagttcttccttcttgcgccaggttataaaaacggcaagaaataaaaaactgcctgctgtaaaacctgccacagcaagcagaagcacatattgatacaggggatatatgaaatcagactgccggtacccataggcagtaagtacattttcatattccggttctgcataccgggatttttggttcttatacgccttcagagccgacagtatggacggttccagtgccggatcctcctctataattgcactgctcacgctgcttatcatctgaaactgcctgcggttataaaatcctgccacgaaaacggcggtaagggaggatgcaatcagaccagccgacataatgagagcaataaataccccgcattttttctgccaatcataaggtatcctccatacggtatccgaagctcctgactgttttcaggcataacggctgatgcagcttctcacgcaggcgcttaattgtaacggtaagagtattattattcacaaaactgccattacagtcccatacctgttcgagcagtctttctctggttattgttttccccttattccgcatcagaagcaatagaacatgatattccggctgactcaggctaatctcctcttcccccaaaaaaaccatcatcccggattggtcgagcgagattcgatcgcaggtgagatattggcctgatacgtttcctgccctgcgcagcagcgcacatatgcgggaatacagaatttccagctcgaatggctttactacgtaatcgtccgctcccttcctgaatcctgaaacaatatcattggaatcgccccggacagtcaaaaagataaccggcagttcccgccacctggatcgtatccagctgcacagcatatcgcctcggccatccggcatattccagtctaccagtacaatggcaggcaaatgattcgtaatcgccttcttcgcatctgtaattgttgcaaagaccgaaacgatacaatttttttcatacagatattctttcaccgcctgcgcgatattttcatcatcttctatataataaacttcaaccacgagtatgctctccattcctcaaacaccttgtgcagacaaaccgtaccgccgtcagattacttctcaaaatctttatacattaaacttggctgtattcccgtgttgttctggtatttaccgcttttgtacaattcatactcgccgtcgatatcgtggtaataaatctggcaaatctcaacattgggatagattctgaccggctgtacacagaaaatttccagagtccagtaaccggaaaatcctatgtccccgaatccggccgtaacatggatgaacaggcccagacgcccggtggaggaacgtccctccagcatgggaacataacggctggtgctggtatattcatttgtccgtcccagatataatctgttcggctccagtaaaaggccatcctcaggaataatgatacgcgagacgggattcggctctttcatgtctagaacgtgattatcataaaccaaaagttctccagcgagtgacagattgtaactgttgggattaattctcttctcgtcaaaaggctcaataataatttcctttcccatatgctttttgatctcctggcccgatagtatcataattcactctccctttccattttatcttttatagggaagtatatcataaaatctgattgatttctatcaattctgaagctacccggcttacgtccgtttaataatgtcactgttcacatcatgccaaaaagcggcatgatgtaaacaataacacgcttcgcgatgcacagaaacggcaaaaaaacgccgttgattgtggtgaaaagttcacttttcatcgcgtcgcgccgtgtaactcggaattttcgtgaaaaatacgcacgaaaacacctcgcagaacacaaccgtgtgaacagtaactaataatcttccggttctgccttataataagtgaccgtcagataattccctgcatgaattgtgtcgtctatcaggcagttcatgctcttcaattcgcgcacataggcttccatgctcttctccgaatgattgttatatctttcggccagcttccagagcgtgtcgccttcttccagacgtatgctggtataatatttgctatagctgaccgccgcttcctcctcggccatggcctgcatcagattgtggccgaaaaaacctgagcttaatattgcaatcagaacaagtaaaactaaaatcccctttttcatccccgtgtcctccttggtaaaacgaatctatgttccaaacatttgttcttttctgtaattttattatagtaaacgaacatgtgtttgtcaatggttttacgcaaaaaaagcgaacaaaggtttgcatttttttcgaacatatgttactattatatcaatagaggaggtacatatatggcacagggtaaaatcactgataaacagagagaaattttagaatatatcaaagaaactattttaaagaagggatatccgccggccgttcgtgaaatctgcgaagcagtcaggcttaagtccacttcttccgtccattctcacctggagcagcttgagaagaacggctatatccggcgggatcccaccaagccgcgtacgattgagattattgacgacacctttaacctagcgcgccgcgaagtcgtcaatgtgccgctgctgggtaccgtggctgccggtgcgccgattcttgcccaggagaacattgaaaattattttccgatccctgtggagatgcttcctaataaagagatttttatgctcaaagtaaagggcgacagcatgatagatgccggaatttataatggagatcgtgtcattgtagcaaaagcggatactgcaagaaatggcgagattgtcgtagcgctggtggatgactctgccacagtcaagacattctataaggaaaagggccgtttccgtctgcagccgcagaacgcatccatggatccgattatccttgatgaggtccagatcctgggcaaggtaataggattgttccggttaatgtaacagcctcacctcattgcgcagcggcagcgtataacagaaagcggagtattaagaggcggcagaaattattctgtctgctttctcttaatactccgctttacaacttctcattagtttgtttattacgatttaatttaaattattaaatatatgtattatttattttccgtgacttggcataaaggtttcagaagaacggcagaaatgcgcttataacggcaaaaatcaatgccggaagcatgttggccaccttaatcttctgatggaacatcagattgactcccacacagaatatcagcattgaaccgactaaagacatattagagacagcctggcctgtcagaagaggttctatgccccgggacagcagggtgatgccgccctggaacagccccagagggattaccgaaaagatgcatcctttgccgatagacgaagccatgacaaagacaataatggcgtcgagaactgcctttgcacagagcatggagatatcaccggtgataccgtcccggatagctcccaccaccgccatggcgccgatacagatggtcagggacgtgctgacaaaaccatccacaaatttggtgtcaccgccgctgcccgacttgatttttatccattccccaaattcttccgtatgtttttcaatattcagaagctctcccaaaagcgccccaatgacagtgagaaaatcatcatcatcgttccccctgatgcgatgcctttctcccctactgaaaagatttcctgtaatgtgccgctgatgcccagaaatataacgcaaagcccgacggcctggatcagtatattctggaaacgctcaggcagccctctttttatagtcagtccaagaagcccgccgccgattaccccggcgcagtttataacggtccctaatcccggcataatataacctctattctgcatacttgcaaaccaatgagagacatgctctgtgaacggttgctattaaacagcaaccttcagacagcatatattgttacatgaaacgataacctgcacgctccgcgcacaggctaccgccatcaatccgcagcaatcagttgacataattatattatgtcaactgattgctgatttaaatctttttattctgtttcgagccataaattattcaagccataaattataattcatcgatacttgcgatctgtttgccgtctctccagatacgttccagatcatagaacagcctgtcttcacgtgaaaatacatggacaatgatatcattataatccatcaatatccagttggccgtattatatccttcgatttgacggcattcatgcccttccttcagaagctcttcctccacgctgtcaaccatggcctgaacctggctggcgttatttccgtttgctatgataaaatagtctgccaggatcgatacatcacggatatcaatgattctgatatcttctccttttttgtcttccagtgcttttacggcgatttttgccattttgcttgcctgtgtcatactgctgtatttcctccttaagttctcccagagtctcggcagaagcagcctcttccaatcggcatgctctagccgcatcataatattcataagcgattctggtcatttcatctatataagcgccggattcatttaaatattcaagaatccctttcataatctggtaaagtgcctcgtccagatcggtgaatgccagtcttctcatctcagtgagcagaggcgccctgtttcttctcggttctatataatctgcaacatacaaaatcttgtccagaagtcccatggccggtttcccggtagtatggcatgcaatagcctgtaaaatctccggatcggtaatcccgtatttattttcggccatccaggctcccagttttgcatggatggtagccggtgcattcagctcattttctgtcagctcaatccctttattccggcattttttaataatctccgactcgtcataacgcttggcacagtcatgaagcagtccggccagctctgctttgttcaaatcatatccatagcgcatagccagtgaaatgcaggtaaaagaaacgcccagcgtatgctcgtaacgcatcggactcagtttctctttcaggcgcccccggattcttataaattcctggttttccgcctcataagccgcctgctttaaaatattttttatactttttttaccggacttcttcggtttcggattcggtgtcccgtttgttgattctgtgttcatcattgcctccctgtcagaagctgtcagcagtaaagtccatgttgttttatataccggtacaccgcgtcgggaatcatccctttcaccggctcgccggatgcaattcgttcgcggattacggctgatgccacatccatctccatacagtggagcctccggattttcgccccgtatttctgttccagatatcgtatctgggtatccagtgaacgcttttgttcttcgctttcccggtctgcagccaggaatgtaacggcctgaagtacatactctggatggtaccatttttcaatatcgtggatagagtcggcgcctacaataaagtaaaattcagtatcctgatattcttccctgagaaggcgcagcgtatccgcggtataggtatatcccgccgttctttttatttcaaaatctgaaaggcagaaatatggaatctcttcgattgccgccgacaccatggcacagcggtctttggaagaagtgattctgtgatctttcttatggggcggagtctttgaaggcatataccagaccgagtccagtccatactcttcgaaggcctgacgcccgagcatcagatgtcccacgtggattggatcaaaggttcctcccataattccgatttgtttcatggcctgtccggactcctttctttacttaggcagaacgatcttcctttttttctcatcctttgcctgcttgtaaagtacaatcttttttccgattacctggacaacctgtgactgtgtcctctcagccagaactgaagctatctcattgccgtcgtccatacagtttttcaaaatactcagcttgattaattctctcgcttccaacgcctctgccacggccgtggtcagctccggcgttacactggctttgccaatctgaaagatcggatcgattgtcattgccaggccttttaaataggctctctgtttacttgtcatgaatttcttactcccgctttcctcttaaacttccttcattacataggtcggtactctttaccgttatttataataatcaaattccaggccatacatacggacggtatcgccttcctcaattcctgcctgctcaagctcctgtaaaataccactgtcctttaagaatttctggaagaactggaagcccttctccgaatccaggttggtgtagccgagcatcttgtcgatcttcggaccttccaccacaaatacgccgtcttccggatgctccaccgtatagggaagattttccgcctggaactggtattcaaattctttttcgaatataacaggttttctgtccacggtttttaacagctcattgacatggtataaaagctccttcactcccttgcctgtgacggcggatatcgggaatacctttattccctcaggttcaaattcctccctgagccgttcaatcgggtcgatctcctcaccggcatagatggcatcggtcttattggcggcaatcacctgcggacgcgtcaaaagctccggattgtatgattccagttccgcattgatcgcgcggatatccgccaccggatcacgtccttccgtagatgcggcatccaccacatgaacgagaacctttgtcctctcaatatgctttaaaaaggaatatccaagaccgattccctgggaagccccctcaatcagtccggggatatccgccataacaaagccctgtccgtcgtttaaatccaccacgccgagatggggattgagggtggtaaaatggtaatttgcaattttcggccttgcattggatacacgtgaaagcaatgtggatttacccacatttggaaatcctaccagccccacgtcggctatcacctttaactccatctgaatccacagctcctgggcaggttgtccgggctgtgcatatttcggcacctgcattgtggcagtggcaaaatgcatattgccaagaccgccttttccgccttttaaaataacttcgcggcggttatcgccggacatgtcggcaattaccttccctgattcaaaatccttaattaccgtcccttccggaactttgatcaccaggtctttgccgttagcgccgtggcagcgtttctttcctccctgttctccgtcttctgcaacatatttacggacatgacgaaaatcagtcagtgtattgagaccgtcatccacctcaaaaataatatctccgcctcttccgccgtcccctccgtccgggccgccggcggctacatacagttccctgcggaagctcacatggccgtctccgccttttccggattttataaatacttttgcactatcggcaaacatatatttctcctttcacctgagccaaaaaagcccggtatgcaatttaaccctgctatgcaattactgcggtaactctgtgcgctacgcgcacaggtcaccgccttcaatgcaaaaacagccccatacattatggtatggagctgtctgaattattcgttaattgctcttgggtaaacagaaacctgctttttgtctctgccttttctttcaaatctaacaacgccgtcaaccttagcgaataatgtatcgtctccaccacggcctacgttgatgcctggatgaatctttgttccacgctgtctgtacagaatgttgccagctaatacgaactgtccatcggctctttttgctcctaatctcttagactcggaatcacggccgttctttgtagaaccaacaccttttttatgagcgaataactgaaggttcattttaaacatgacttacacctccttaaatcgaattttgatatattcctctccatatgcctcttcgatattcttaagaccaagaataagagagtccataagaagttttgattctttactgatgtccccggtaaaccggaatgtaaaatgccctgtctcttcttccacattgccgtcaaatccgtcgtccgtaaactgttcgaccgaattcgccatgttgagtacaagcgccgatgcggatgcacatacaatgtcctttccgtaatcatcatagcctgcgtggccttttaattctattttcctggtatttccctcagaatctgaaaatacgtttactcttatcataatttaattaagcattgattttgtcaatcttaacttcggtaaagagctgtctgtgaccatttttcttatggtatccagattttctcttatacttgtaaacgataactttcttgccttttccttctttcactacggttgcggaaactgtagctccgttaacggttgggcatccgatctgcatctctccgttgttaacagcaagaacctggtcaaaagtaactgcttctccagcagccgcaccaagcttttcaactttgattacatcgccctcggcaactttgtactgcttaccacctgttgcaataatcgcgtacatatggcacctcctattatcattactcgccagcttcggcggctttacgcacttatagcctcgctgtgcggcacactagaaaataatagcattcttttaagaagttgtcaacatttttttcagcaatatgttatgcaggtgaggacgccgccgggacggccagcgttcggggtggtggggtgtgtgtatgagtctttcgtcccgggggaggattgccgtggtttggggctgcgggcaaagataaagtctgcggagcacactccctacctcagttaaatctccatatatttcagtaacagcgacctgtctgaactgttacagcggctgttttcgcagcagttcgtccttcttttgaattctccaatataagagaaaggcggccgccgctcctgctgtttcagccactataaaagatacccagattccggtcagaccgaacggcccgtggaggaaccaggcaaggggcagggtgatcacaaactggcggagcaggaacacaatcagggaatcaatcccatttcccatggcctgaaacatcgtcggcagaataaacccgatcgatgccggcaggaagctgaccgcaataatacgcagcgccggaatgccgatttccagcatctcgctgcttgcgtgaaacagagacaaaagatatcccgcggccccctcaaacagcaaaaagccaatcaccataatcaggaaacagattccgatactgtatttgaggcactctaagagacgtttcctggaacgcgccccatagttataccccatgatcggcatggccccctgagaaaggccgctggccggcatgaagacaaatgtctgaagcttatagtaaatgccgaacagggagactgccgtattggaaaaccggatcaggatggcattcagtcccatcacgagcagactgccgagagcattcatacaggcattgggaacggcaaccgtaagaatctgccggataatcgctccctgaaagtgaaaaccttttaaatgaagctttacatcatgctgaaaagccaccagcacgaaaaacgaaaggcccatggacgtcatctggccgattacagtcgccacggctgctcccgtcacgcccatggccggtaagccaaaataaccgaaaatcaagataggatccaggattatattcagtatggctccaatagcctgcagcgccatcgggaatatcatcttgccggttgcctgaaaaattttctcgatacagatatgaatgaatggcccaaagcagaagccgacacagatgcgtgcataaatcagcccgtctgccagaatcgctccgtcattcgtaaacatcctgaaaaacggttcgatacagaatgctccggccgttacaaagagtatggaggctgtgagagcaagcagaagtccgtggattaccgcactgtccgcttcctcctgccgctgctccccaatttcctggcaatataggaattcacgccgactccgatgccgacggaacatgcaactatcagcgtttgcaggggaaaagcgagtgaaaccgccgtcagcgcattttcactgtacctggctacaaacatgctgtccacaatattgtagagtgactgaatcagcatggacagcatcggcgggaacgccatagacagaagcagaggaagcatcgtcctggttcccattttattttccttcatcggttcctttttttcaagttccgttaattctgtcgtttccattgtttacctccagtcgtcggcctcaaaaaaacagccctctccctgctttggtaacataaaagcagtaaagatgggctgtaaatttcagcacttttcaattcacgctctaatcagcgctttaatgattccttctaattcggtacaccgtttggctttactccgcgcccataaacctcatgcagcggttttctgacctttttcctggtaatctcgacgagtcccagctttgtcatatccaccagaaccgttttaaccggatccttttttaattcctcctccagtacggtcagaagctgttgtttatgttcctccctggccatatctatgaaatcaacgatgataatgccggacaggtttcgcagacagagctggcgggccgtctcggcggctgcctccaagttgattttcagtatcgtatcctcagcattctttttgccggaatattttcctgtgttaacgtcgacgacagtcagggcctccgtcggctctatgacaagataacctcccgatttcagccagaccctccgttccagcgcttcctccagtgctgcttccagcttgtaaagcttaataaggggaagaaggggatcctggtaaaattgcagtttttccaggtcggccttctggttcttatccaggtaccgtctcatttcttcatagcagatcttatcgtctgttatcacggactggagactgccggcataggtgtcccgaaggctcaggataaacgaaggctccgctccctcaagaagcgtaaaacaggttctgttttccgccttggccaaaagctcatccatcctctgtttcagggccagcacctccccgccgattacctcttttgtggtctccttcgcgttggttctcacaataaccccaaagccgttgcggcctgtctcttctttcagggccaggagatactcttttacttcttccttccagacagggtccgttatcttagcagaaaatccgatttgcgtctttccaagcgttactaccgagtatttcccggtaaagttcagattgctgctgagtacgggatcctttgtctttacggcatccctgcttacctggacaattatctcatcgccctgtttcaggccccggccctcctgtgcccctgcggcagccagagggctggtgaatcgatgctccctgttctcagagagactgtagtatcctgtttttcctcctccgagatcgataaaagctgcatttatattttttactatattttttacttttccaatatatatgtttcccagaaggctgccgctctcctccggttccaggctcagggaacggcatctgctgtctgacattagcgccgacaggattcttccgcgccaccttgtaacaatcagtttattcaatgtctgctccatattcttccagtgggacaaatttgtggctgccgcccggggcgccgccgtcactttcatcggacgcatcgttgccctcgtcggcatagacctcttcacgctggatctggaacgcgaaagcaggatattccattccgatggactcatagtaggcgccgacaacctgttccggctttacattggccgtgcttcccgaggaaactttcataaaaatcccggtattatcatccgtgagccggacctcatagatgcaggggcgcaaatccatcgccttttgtcccttttttgtcttttttacaatctcaattttatcgctgtggcaaaatgccagcagatttttcataaaccgggggacatcctccggctcatatccttccctgaaccacatcgtatagtcggcagccgccacctgtgacatcgcatttttcacggaatcatccagctttctgtagctgagtacacagaatccctccgcattttccctgttgatctgttcaatcatcgttttggaatcctttgtggaattcacttcaatgtccacatactcgccgttacttaaaataccaactcccagcggtgatgcaaaggacataatctgatgggggctgaacccctcactgtaacggatatccacgtccgctctgcgcatcaccttctggaagtaacgcatgatatcaagatgcccgataaatttgagcgggccctgcttactaaacttcattcttattttcatagcagacccctcctttatattttgccacaccgcagccggaacattttgcacggcagttcggcgtcaccgattcatttaccgcattgttccattcgcgttttaagaattccttcgtcacgccggtatcgataaaatcccaggggaatatctcgtccaggctgcgttctctcaccgtataaaaatcgatatccacaccgcaggtttcgaaggcctgcatccagatttcattatgaaagtgttcagaccatgaatcgtagagcgctccgtttttataagcctcctcgatcactgccgccaccttcctgtcaccgcgggccaaaacgccctccagcaccgtcagatccgcctcatgccagttgtaacgcagactcttgcggttcagcatctctttcatcctggaattgacaatgtgggcccgctccagaaattcttctttggtacacattctggcccactggaacggcgtaaacggcttcggtacaaagaatgaggtgctggcggtaacctgtacttttccggaacgctcttcctttggaatattatagtactcttcggccaccttctcggacagctcggcaatcccctgcatatcctccggcgtctcggtgggaagccccagcatgaaatagagttttacccggttccagccgcctctgaacgcctcggccgaaccgttcaggatgtcctcctcggtcagtcccttgttgataacgttccgaaggcgctgggaacctgcctccggcgcaaaagtcaggctgctttttttaacatcctgtaccttgctcattacatctaaagaaaatgcatcgattcgaagagagggaagggatacgttgattccttttccgtcaaactcctctatcagaaaggatacaagtccctccagctgtgtatgatcgctcgagcttaaggagctgagtgaaatttcctcatgcccggtgctctttaacatcttataagcaagatctttaagctcttcaaggctcctctccctcacagggcggtataccataccggcctggcagaaacggcagccgcggatgcagccgcgcataatttccagcacaacacggtcctgtgttaccttaataaacggcacaaccggtttttccggataataggttgcgtccatatccatcacaagctgttttgacaccttatcaggcgcatgaggattgacgggaaccatccggtctatggttccgtcttctttataccagacatcatagaaggaaggaacatagatgccgggaatctcagccgccatttccaggaagtccttcctgcttccgccatttctcttattctctttgtaacggtccagcaggtcgaaatacacgacttcgccctcaccgagatagaacaaatcaaaaaacggcgcgatcggttccggattgtagctgcatgggccgccgccgattacaatgggatcttcccggttctgtcttctgcgtgaagcggaatatgggacaggtcaagaatctgcagaatattggtatagcacatttcatactggagcgtaatgcctaaaaaatcgaaatcctttaccggatcctggctttccacagcgaaaagcggaatgtttttctccctcatcaacttgtctaaatcggtccacggagagtaaacacgctcacaatatacatcatcccgtctgttaaacatatcatagaggatctggatgccgagatgggacatccctatctcataaacgtccgggaaacacatggcaaagcggacatccacttttttagggtctttatttaccatgtttacctcgcctccgatatagcgggcgggctgctggatacttagtaatatttcatcatttaaagctagttttctcatgatttttccttatttattgtgctatttgcacagtattttgatttgtggtaaaggcctgtttgaatcgaaatgagcttgaatttacgtccttatttgctcttttttactcttttttttacctctttttcgaagaaaattaggcctttttttgaaaattacgacaaatttttttcaccccaactaggtaacacgggctaaaacaatacgccacaatgcataattataaggcatttcacggtattaagcaacaccattcggcagaacataatcaagaaaggactgtgaaaatgcacaatcaatgacctgaggctcatctgacggaaggatctcgtcaataaaactggcgtctgtttctcttttaatagtgccagcctgtttttaaagatactcaggtgctcaacatatgcttcggcagcttcatcctctgtttcatatcctcctttctttccatattctatctgtaggccttcggtaaggttcttggtgcggtgataccaggaaccgttttcatcaaagattgggctgctgcccatggaattattcatctgatcctcctttgaatgaggagtatacaaatttttgaatatgataagtataccatattccatctaaatctccattccgcgcgccttcaggcgcggcacaaatagtgatgaaagattttcaaaacctctacttcatgcgataataactttcaagaagctacactacaaagcacgggaggaggagttgtaaattctttctcgttttagacagcatttaaatcagtgtaagttctgccttttcaagcacaaataagtggctctataagaccgtacactaagaattgttttaacgccttggttaatttgtgtggcagttcagtcaatggcttcttatctttttcagaaaggagtctgactatgaaagttacttacaaaacctgttgtggtgtcgatgttcacaaatcatttctcgttgccacaatcattactaccactggtggtatcgaaccttcctatcagaagaaacgttattccacctttaacaattcaattcttgaattcaagcaatggcttcttgacaatgactgtcatgatctttgcatggaatccaccggtaaatactggattcctgtctttaatcttcttgaagatgaaatcaatgtcaccattgccaaccccaaatgggtaaaagctgtaaaaggcaacaaagatgatactaaagattctaaatggattggagatttattccgacttggacttgtaaaaggcagttacataccttgtaaaaagattcgtattttacgcgagttcacaaggtatcgctataagattgtttcctgccgttccagtgaaaagaatcgatatcagaatgcgcttacggtttgtaatgtcgcactggattctgttgtatccgatatctttgggaagtcatccacatccattattgactatttgcttgaacagtctggcaattctatcaatcatgaagaaatcgcttctaaacttcttaagagcctcaaatctaaagaagatgccgtgattgaatccattgaaggataccagatgactgattcccaaaaatatcgtatgcacctcgtccgtgcacatatggattatatcacagctgaaatcaatgatgtagaccgtgaaatagaaaaattgatttcttctgatcctgattttgaaaatgcgatccagtttctaatgactattccgggtgttaaacgtgacagcgcaatcactgtcatctccgaaatagggattgatatgactcagttttcaagctccaaacgtttatgttgctgggccggattaactcctggcagcaatgaatctggtggcaagaagaaatccgttcgggttacacgtgccggtgtctacctcaaacctgcattagtgcagtgtgctcatgcagccgtcaaatccgagaaatctccttactacaagaagaaatatgaatctctgatgaaacgccgtggcaagaaaagagccattgttgcaatcgcccgaatgattcttactgcaatttaccagatgttatcaactggtgaatcatggaatccaagcgatttgtataaaatcgatacacttgaagctttactggaaaaacaaaaagcaaaagccatcaagcaagccatgaaactattgcaacgcgagggattatatcctccaccagaaccaatagcttcttaattgttgttttaataaacacttataaaaagttgccacttgctgacagcttagataagtatgccacttttgggctgtcctctactttctttcacactaatactccatatatcagtgtccgcctccgctgttaatccagctgtcaaaagactctttggggatgcggtaaccgtctcctatttttataacgcggaagggcctttctccttataagcctggcgtatgaattcgtaggctgtatttcttccgattcccaggagattttgaatgtcctttaccttatacactattttttcaccggtttccttctttcccatatgcaatcacctccttttgcctaattatgggaaagaaccggagtttcctgagaatattgaacggttttctgcattatcagagaaatcccggttagttggaaaaagctgcctctgtctctcttaccggagaatggagtcaaggtccttctacctttaattatgggggataattttgaaataattttttcgcagatagtaattttcttagtatttggaatagaaccagctgtttggttgtccagaaaaagaggcgctgtgtagctgacttacgtcggctatacaacacctcttgcatacgtttcaacggagaattgagctatgctacggtacctgatagcatttcattacatctttaatcgaatcatagtattttggacacattctgttacaaaggtcccggcatgttcagaaacctgtatttcgttaagagataagttttttgtgaatactgccataggagaagtcaaaagggtgaatcgggagaatatcgccaaaaactgacaaaaggccagctggattctagctgactttttttgcagaattaaattttaaactttgggttatcaggtattcttttcttccggggataatcttggcataaagtcccataagcgactgggcatgggcgaggcattcctccagttggtaggttttttctaaatacccatgagctcctgcttttagagccgcaagcctgtctccactacctgttttggaggacagcaccaaagtcggaaccggtttaatctgacatattagctacagtaaatccataccgtctgtctccgagagcacaatatccatgattaacagacagaattgatgttctgtcagctgttcaaccctatcataggcgataatacacatgttgttgcgttctgcattgcatactttatctctttacagacatttaggtcattatctattacaagcactttttattcgtatcaatacccctccagagcctttccctgaaaacggaaaccagatatacgtcaacgacagcggttctcttcaggttaaggccatctgctcctttataaatgggcatggataagaaaaatctcctgccatgcccattttccaccatcaagctatttctttactttcccaaaggggagctcacaatctctttgccctgcagacgtaatctgaatctcaaaattcctgcgcaccgctgcagcgaatacataagtgactggaaacagagcctatcgggatcaacttcttttaagtcaatcacatgatgttggggtcaaaaggtcttttgcccccttttgatactcgttcatcgctttctcctttctgtccgctgttatcgcactttcaaaatgcttcctacctgaaggttatagatatccactcccggattgagggccagtaagtcttctaccttgcagccatactgcttactgatctgattcagcgtatcgcctttcctgaccgtgtgcgttgttccatttcccgttcccacggtccccactcctacggttccctgtaccggaagcagcacataggtctccttcgctcccatgcgggttcccgccggtatatcaatcgttacgtttccgtttgcgtccacgggatagatacctcctgaaaccgaacggagtgttcccgtagtatggtcaaaccggtatagcgcaaccgtggaaccggccgtgatcgccgtctggttcgttgccggaaccgtgagtttcgctgcggaaagcagggttccgtccgccgtgagggaaatcaccagtccgttctcctggcccgccgccttcacagtaggcttcacaggctccgctatggggtcgcccgactgcaccggggccgtgtggatgcccagattcaagtcggtggactgacctgccgcgtttctcatggactggccatctaaggaccagacagcctttaccgccatggtatcgtcccgcacggtcactgtcactgtttttccggtctgctttgccgcgtccacggtctctttttccacggtgactcctgctgtccttactgccgggttgttctccacggactttggtatgataacctccatacgcacggcgctaacatccgctttctgaagctcgctccttaccgtatcctggggaactgccaccgagatgtccatgggacttgcagccgtggccccggctgcctgtgctgcgctgttaatggccgccccgtccggttttaccatgacgacagcgcttccctggtctgccgaggttgtgatattgtctgtggttacggttgtggcgcttccggtcgtattgccggctgcgtcttttgttacctgggttgtcacggtcgtggtctttccactgctgtcctttgacgtggtctgggtcattgtggtgctggtcccgttttccccggctgttgtggtcgtggacggtgcggtggaggaacttccggatgaggatgagctgccgcctcccgaggacgaaccgccgccgttaatccggtcaaagatcacggaaatgctgtgatccgctgttacatgttcaaatgtgtaggttgtcacagtgcctttgtctgcgccgtccacggtgacttttgaaatcctgtatccgctgtccggcgtaatggtaaaggtccggccttccccatcatttacggtaaccgctccgcttggggaaatggttccgccgtcatttgctgatgcggtgatggtgtgtgtgactaccggcgcgggagctgttgttaccctgatggtaaatgtcttttcatatggggtagtggctgtcaaaccgcctgcaatcgccgcttttacggtggccgtacccgctgtggctgcccggaaggtgctgccgcttatgatggctccggtgccgcctgcatccgccacgctccagacgatggcccagttggtggcgctgtccggtaagacggttcccgccagtgccagatcggtattcacctccaccgtggccgcatttgtcatagtaatctctgccaccggtatgaaggtcacggttttttgaagcgtcagatcctttcctatcacatcgccgtccgatacaacgataccgtttatggttccgctgtcatagcccgctaaacttacctcgatgtggtatgtgcccgccggtatgccggtgatcgtataggaaccgtccgcgcccgctgtgaccggagcgcctgtattgatattttcgctgttcttcagctgcaagactgctgcaattccggttcccgtgtcactgcccctgaccgttccgctgatgatgtaggtttgtgctggaggaacctctgtaatggtgacggtggccgtgccacttttactagtatccatagtggagacagccttgacggtcagggtgtctgccgtctcgtcggaagccacggtcagcaggccgtcagcgctaatcgtcgtgccgcctgcatggctaccgtcaatgctccaggtcacggtctgggccggattgttcgttccggtgaccgttacatgaaactgctgggtggttcccttctgtacgccgggtgctgccggggttacggtcacgccggtcaccgtgggcgcaggcgccgcaatcgggatagaaaaccctttggtatcatttcccttgctgttttccgccttgactgtaaatgcactggttcccgctgtagtaggagtaccgctgataacgccggtactggtatccagattcagaccgtccggcaggctgccattgctgacgctccatgtgatgggcgtggtgccggtggccgtcaaggtctgactgtatgccgcccccacagcgccgcccggcaaggtggatgtagtgatggtggggacagtagctggtttgaccgtcactttctcgttggccgctcctaagaattttttattttctatctgcgacgattcaacgagctggccatttataaagtagccgctgcccaggcccagaaatgatgccacagtcagcgcggtattgctttcaattgcgatagccttgttaccgccctgataggcgccgccggaaagagtgacggtggaggtacttccttgcacgaaaagcccgttgtcgtccccggtaaacgtgccgccggaaataacagccgttccgccgtccgttatatagagaccaatggaactgtcataattgccagttccgccctggatcgtgggagtatccgaaagggtaatactgcccttttccagaaagatgccgtgctggtcggcagaccctgtaatggtcgcgctcccagagatcgtcactgtgcagttctccgccagcaggccaaaaccgttgccaagtacagggccggctccgccagacagggaagcgttctccttgattacaatggcagcattttgagcccgtacggcatctgcaccaatatttgaacctttgccacccgtcagggatacactaccctccacagtcagctttccgctggatataaaaacagcctgaccgaaattatccgcactcattgtttgtcccaaatcgctgccaataatgccgcctgtaccgcggatggtcagctcaccgccagcaactgcaacggccttgatttgatttgcctttgaggtatctagattataattgttcaaatccagtatccagtttccgctttcaaaggtgacagcgccggtgagttttacctcgcccgtgagcgtgatcactttgttctccactgtggctgcgccgccgaagtaatccgaaatggtttcgaccggagtatcacttttaatcacgcctccgcacgcgatttttgcccttaccttgatggcattaccctcaaaataggcctccttgccatcggcccctgcgcccaccagcttgatttttgccaggtcggcttctaccgcactgatggcgatggtggggttgctggatatatcataccccgccggcagtgtgacatagatgctgtcatctccaccgtttaaatccgggtcgatgacgaagctgtccacgccattcacccgaggggttcccgtgccgccattgatgaatattccgttttttgccgtagcgccaatcttagcgccgccgcctacagtgacggttttgctgccggtcaccgtggcgttattgccatcgcctccgccaaagagagctccggctacgatgccgccggtcactgtaacgctggtattcccggtcaccatggcgttattgccagcgcttccgccccagataccagataaaatgccgccggtcaccgtaacgctggtgctgccggtcaccgtggtgttattgccatagcttccgccaataatattcccaacgtcaccgccggtcatggtaatcttggtatcgccggtcacactggtgttgtttccgcccccataaatcatataccaaccaagtccatatccggcatcggttgggtcggtatctccgattttgaggtactccttatccccaatcgtgccattaccgtccttgtcataaaggatgttggttttggtgttaggctgcccatccgttgtgcccgccacaattttgatctctgcaccgttagcgaaaattatttgtctatcaacatccaccgtaggggcgggcccgacagtctttgcccttaccttaatctcattgctttcaaaatacgcttccttgccctcggccccgtcgcccaccagcttaattttcgccaggtcggcttctactgcgccggtggcgatggtggggttggaggtaatgtcatagcctgccggaagctgcacgttgacactggcgtactccgtcagagcgtcactgatgacgaagctctccacgccggtggccacgggcctgtgccgccgttgatgacgatgccgtagcgcgcgccgccgattttcgcgccaccacccacggtgatgctggaatcctctccgaccgtggcgctgttatttctggaatccgaaacgtcattatattcaccaacgccaaataagtgaccgctctggtaaacattcccctgcacctctgcatttccgctgatggtcacggtggcggcgcctgtcacatcgctttttacattagaaacgctattctcattattggcatatccgcctccaaatacatcatcgcttaaaactgcattgccagaaatggaaaccgtaatgttttcccccaccgcagcagaactgttaccgttcgttgcaatgccgcctccatgcacccagctcccaatctctccgcctgttatttcgagctttgtttttccagtcacgttggcagacgcatttttataggcctttccgccggcaaaaattgatgaagacacgacgccgcccgatatctgaatgctggtatcgccagttacattggcgcttcctccggaagccaatcccaaaccaccgccatagatactccctatcttcccgccaatcatggtaatctgtgtgctcgcgacattatgattaagactgccgccatagatgctcaattgggacaggtcgttgccggcggcggtgccgtcgtaggttgctccgctcccgtcggggtcgaaaatttcatctgtgccttcgtcaagctggccgatggtgcccttgtctatgtagaccacggtcttggacgaatccgagctgcccgcatccagaagcagcggtacgccgttggcatagagaattttactatccaggttgggcacaatgttttcctctaacgtcctccgctccgccagcttcttcaccagttcatggagtcccgccagcttgtctgctctcgccccggtaatccgctccgtggcagcctcgtcctctgacaacgataaaaactgctcccacagggtgggaacctccgccagcttgctgctaatttccgtcacccagtcgtcgaattccgggtctgcatcgccgggggcattttcatagagttcatctaccgtgggcagggcgtcgatggcagcacacaaggtctctatctcgtcctgaatcgccgcggcttcctccacagtgacggtaatcacgggccaatccacgccctgggcgggagtatacccggatgcagacgcagtaaagataaactcgcccggttctccctcgtaaagcgcatccggctcccagaccacgccgtcaatcaccaccgactccggctcctcggccccagactgtaccgtggcggagagagtctttggcagcgtcagctcctcaagggacgtcctcgccttgaccgtctggtttctcactgcttcgtccagttcgtcaaaggacgtgacgatcctgtcttctatggcgtcaggctgcaccagttccggcttggtttctcccggtataggaagcttgtccccaccggtgatgttcccgccggtggtatttccatttccgccgccttcctcctgttttccgcactcggtgcagacatagccgcagggatggccctccacggcctccacatatccgcagctttcatcgtgctccccgcgctcatgtgggcagtccagcttatagcagtcctgggtgtggacatgccccgcattgctgtccgatgccgtcacatcctcgtcctcgatataaccgcagatcagctcgtccgtatagcagtctgccgtatgcttgtgttcgcacggatggcccggctctgcctcctgatacccgcattccccgtcatgctccgggtgatgctcacataagccggtttccgctccccggtcctgcgtcaccgcaaataccggcgtcggcatcatggtaaacgccacgcaaaacgacagaatcaccgccgctcttgccccgggacggtggtagggccggaatattcccgcccccggtgtacttcgatgtcttacctttgtcttgccaaacatatcatccttcctccttcaaacgataaaattttccccataaaacagaaattgccccgtctgcgggttggttttgcaggcggaacatttgttgcattcattataatatatttagacgaaaaaaagggggattttgaaaaatgttgccagccgtttactttcggagcgaaaaaaaatggtttttttatgctatactgatgttagattaaaaaatccggaaagcggaggtgattttttgagagtgctgattgtggatgatgacagaactgttttggaggacaaccgggaatattttgaaaaaatggggtatgaaactgtctgtgcggatacttccggggccgcggaggaaatcataaactccgccgccctggactgtgtgatccttgatatcgacctgccggacgggaatggatttgagctgtgcgcccgcgtccgggaaaggaccggcctgccgattgtgttcctctccggctacacggaggagcagagccgcataaggggattttccatcggcggggacgattatgtctgcaagccatacagcttagaggaactggagctgcgtgtccgggcgcggatcaaatccgggcagaatgcccagccgccgggaccgcttcaatacggggaccttatgattaaccccggaaaccgcagcgtatgtttaggggagaaatcggctgacttttccacctttgaattcgacgtgctttattttctcgcaaggcatcccggagaggttttttcctatgaacaaatatacaatcaggtctggaaagcccccatcaacaagggaattaaatccctccaggtcatcattgggcgtatccgccaaaagctcctggagctttgccccggccacgagtatatccagaccgtccggcgtaaggggtatctgttcgtaccgtaaaacggatcgtttagcttttgcttatcgcctgatgcggtttcgcagcttcccaagaaaccttttccatgcctgggggtgcagatagagggcggccccgccgatggagacagcaactgccgcaaatcccgccacaacagggagcatgtccggttcctgcacagagggttctgcccccgtctctgccaaagcctccgcagcttccttcatgtcgccgttagctgctgaaatttgcgctgtgctttccggcgcttccgataccggagcagacgacgcacgggagggtgttggttccgctgcggcggaaggtttctttggttcatccttcacagcagaggaagatacctcggtctcatttggcagcgccggttctggcaccagtcccgcagcggatgtggattccggaacagtaatcggcggcgcggcctcgtaatcaagtgagccgcccggcaaatccgatttctgcgtgataccgtgggtaggctctttcccgtcgccgtggcttccgcctgaacttcccgtggaagatgttgccccatctccgtccgattcatggtccgtgccgctgtttcccggctgaccaggcgggggatctgaggttacaggcggcgcagattccggctccgatgcttcgggcggagtagtctccggctccggatcgggttccggctgctttggcgggtcaacgatatccgtgccgccgccccggttccctccaggctcctcgtttacctcaaggctgtccattgcaaaacccagtacgttggaatagtacatgttaccgtcatcattccagctcaggcggataaaaagctccgaatatctctccagatcctctgtccctgcaaacagggttatgtaaaaaccggagcttaaggttgtgattgtctcctcctgatagagcgtccagttcttcccgtcaaaggaatattcctgggcgacggtgatgggcagacggtcctccggcttggagaacgtgcctctgagacggtaggtatccccataggtcccttccatttttaccgcttttacctccaggaaggtgaggggaaaatcatcataaaccaccgtgcagccaggtgcggtctgtgaagccataccctcaaactcccccgttacggtaaagcgccggcgcagcttttggtcttccccatgccctgacaaatcccatgtgacaggaacctcctcataaggatatatattcgtcccattatggtttatgcaggccgaaatggcagcgggcagcatcttatcatccaaggtttctcccggcttcaccacagccagcgcaggttcccactcccacacaaaaggctgctccgcataatggaccattccggcaacagacgtgttttccagagtatccagaataaatccggtgccctcctcctggaagacggcgtatccgtcctctgcttccaggtcaagtctatttaagtgcagcatgctccccgtgccggaggtacgaagcaggccctgttcccctccggcgccccgtattgtcagagggctggtcgcctgtaaatacacataaccgttgacagcaatggtaaattctcccgtgtcaatgacaaccgcctcggcgcgcatattgcgggcatagtaaaaatcgctgatagaaatatcatcagccagctctactgttccacctgtatccttatgaccggaaagccactccatcagttcctctcctgtggataccgtgtctgccacggcattggagggcgttgccgtgagcagttccacctcctccacgtcggagggtgttgctgcaggccgttcctccgacacctcttccttcgcaccagagggcgttgccgtaagaagttccacttcctcctccatttcctccgcatcggaaggcgttgccgcgggcagttccgcctcctctgcatcggaaagcgttgccgcagatggttcttctgttgcgaaagctatgggggtgaggcataatgaaagaaggattgccgcagtgagcgcagacaccattcccttataaaccgttttcataaagatgattcctttcccgtgaggtgacagaatggaaaaaaagaaacttcccaaaacagtaacccgtgttatcgcactgatgatatgcgcggcttttctctccctttcaggacttgccatcttataccgtgttgataataagtataccgcaaaagcggagatggtacaagaacatgtaacgcttctccctgtctccggcacggattttctggtggacgggtgggaattctaccctgaccgtctgctcacgcccggggacttttcagttcaaactccctctccccgatatacggtctgggccggggaatatccgaacctggccttattccatactgacggaaatccttacggcgcggccacttaccgtctctgcttaaaggggagggcatgatgtccctttaccttcaggaaccactctgcgccgcccgtgtatttgtggacgggaaggatctgggcggtccgggttcggttggcggcgcagatgtgatcggcggcacaggcagcacagacatggcgcatggcgcggcgggcggttatcgtcctcttattcgggacacggtttattccttccctgtggacggcgaggcggagctgattatccagactgccaactactcccactattatggcggtctctggtttcctcctatggtcgggagtacggacagcgtggtccatatggccgcctcccgcatgattttctatgggattctctgctttagcgccctggcgctggccctgttctgcgtggttttgtggtttgggcgaaaagggcggcgggatcctgccgcgttttggttcggccttttatgcctgaccttctccctgcgggtatgctacccgttccttcatttatggggtgtccccttcgtgcgcccgctgtatgcgctggaggatgcggcggccctctgcggcgtttactgtgcggtgcggatctccctctatttattcctgccggattcggagcatcaacgcctgaaccgactgatacaaaacgctgccgccaccttctccctgggcatgtgcggcgtcggggttctggttcctctgctggtgctgccctcttttcccggattcatgctgtggtacggaccgctgatctccggctatcagatcctggccgccctctttctgattgctgcggccgcctgcggctgtgtgctgggaaagccttattcatgcccggctcttatggctgtcacggcaaacggtgtctgcctgctttacggcgcagttacggtgggacggtttgagccggcagtcggaggctggccggaagaatacggggctttctgtatggtgcttgcctttgccgcgctgatggtgtcccgaagccgggcgatggcggcggaaaacctgcgtttaaccgaacacctgcaggaggaagtggacgaaaagacccgtcatttgacaaagcttttaaaagagcgcggccagctcatggcggagcttggtcacgacatgaaatcccctctcaccgccctgtccaacatggcacagattatccgcctcaatgacattatgctggatggggacacacgggagaaaatgcagggtattgaggataaatgcagcgttctcgccgaccggctcgaatccatccaggagctggcgggcgaggcgggcacgctgccgcagatggagccgctctccttaaaccggttcctggcagacttttaccgcagcaaccagccggtggtggagctgaccggcccggacttcttatgcgagctgacgcccctgccctgtacggtgatggcggatagccggaaactgacccgggcgctggaaaatctgatttacaatgcaggcgaatttacaccgcccgatgggaagattgttctctccctggaacgggatcagaactttgccctaatctgcgtggccgacaccggctgcgggattccggatacggaaattcccaaagttttcgaccggttatacacgacccgcgaagatgagggcgggcaggggcttgggctttccattacccgcgccattgtgctggagcatgggggagaaatcagtgtggaatctgtggttgggggcggcagtacctttgtgattcggctaccgctcatactgtgaagacaaaaggcgcgctatacaaacattacaaaaacaaacgggatatttttgacagtattctggaacgtgtatgccaactggatcttgaacgttcccaaaaagcgggtgtagcagagaacgattttgataaaatgccacagcctttccataacactacagtggaaagcggccgataaactttattgtctgccacaatccggcatcgctccggatactcattgacatcaatggcctcagccggcctcgccattacccaggccattgtgtcggaacgaagctcgcatataaactgcaagtctggaaaatccccggccatctgtatgatatggccggggataattatacgctcacaagtttgtattaaattctgttaaccatttctgaattaccgtataaagtaactctatttccaggggtttagaaaggaaatcattcattcccgcctctttcgccatatctttatcctcctggaatgagtttgcggttagtgcgataacagggatttttgccgcgtcaggatggccagaggcccgtattgcctttgtggcctctaagccgtccatattaggcatcctcatatccatcaggatgaggtcaaaatatccggaagcactttgctcaaaacatttgacagcttctgcgccatccccggctagttctacctgcattcccttcaaggtcaaaatctctgttgcaatttccgcattaatcgggtgatcttcagctaatagaatccgcacattttcaaaataaaaatcagtcgctgattccggctttaaatctatatgctttccaaaagaaaggggaatggagaaggaaaattcgctgccctcatttattttacttttcactcgtaaagtgccgcccataagctgcacaatattttggctgatcggcaggcccagcccggttccctgactgcgtattcggttggcgccggtttgaacaaaggattcaaagatacgctctaaatcctctgccctgatgccaatcccggtgtcagtgactttgaataaataaacggcctgcaggtcagtggctgcagtttcctccacggtcagatgtaccgttcctcccggcggcgtaaatttaatggcattggaaaccaggttcatcaaaacctgctttaaccggattgcatcgcccttcaaatcagaatgcctgaaaccggtttcacagcaaagcgctatttcccgggcttttgactgtgactgcatcatactgcaaagttcatccagcagctgttgtaaggagaaatcttcttctgcgatcgaaagcatgccgttatcaattcggctcatatctaaaatatcattgatcagccccaataaatactgtgaggttgctttcagctttgccagattgccttttatgctctcggggatgtcatccttcattgcgattagtgcggtcgttccaacaatggcattcatcggtgtacggatttcatggctcatccgggagagaaattcacttttagctttgttctccgcctctgccctgatcacatctttttgcataatggcatttttcacacgcaggctggcgattacagtaatcaccattatgacaagcagtaaaaaagccgatatagccgtaattgataaaatgggattggtctccacaaaatttttcaaagataccttggcatctccaatggaaaccagattatgatctaaaagagaaatcctgtcctcctcagataagctgttaatgcccttgttaatgatagacagcagttccggatttgccggcataggcatagcaaagctgattttcatgcggtttgccgacaggttaaccggaaccacgttcgtataaatgttttcctgcatcacctgttccactcttgcagaaagtccacaggcaaaatccaccttaccggtatttacggcggacaaaacttcctcaatggttgtaaaatattttgcttcgcttgcttttatataagttggaagatggcgccctttcaaaagtccgcaggttaatctgtctgccggataggtcactttcctgttacggacaattaaatcatttaatgcggcgtagggcttggtctgtgccagttcactgcgcatggcatccgcggcatcatcaaagaaaatgccggccatgtcggctttgccttcgataacgagttgctgggtatgggcgtaggagtcggccagtatataagtaaacttgatcccgtatcgcgcagtaattttgtccagcagctccggtatcaggccgacatgatccccgtcctcgtaaccaacacaataaagcggatgaaaatattcgggaaccgccacagtcactgttcccttctgttgaatataggctttttcttcctcgctcagcagcaggttttccacacctgtatcgtcaaaataccgcgtatagacttcttctgaaaaatgcgggtcagataacaggatgcgctccatcgcccaattcagctcttttagcagctccctgtcgtcaggctgcgtaaccagataatgaggctgcgcatcaaaatacgctaccgcgcggaactcacctgtatcatccgttgcatttccaagtttcaggtcgatttttccggcctccaaatccagattgatttggttggcggcaacttcttcagcggtgtataatttgattgtacagtctaaaccattggcagagagaaattcctccagccggcgcatattatcagttgcccgcttcacaacacctatggttttcccgttcaaatctcttaaactatagccctttattgcttcattatcctggcgggccagcaaaacggctttggtttggccgcagctataatccggataagcgaagtatggttcaaacgcctctgaatagtaggtgccgcccatgaggtcatatcggccgtcaataaagtcctggaccatgtcattcgcatcggtatcaatgaattcatatgaccagccggtatattttgcgatttcatacagatagtccacgaccagaccggagcgtttcccattttcatcgatcatcgtaaagccttcggcttcaggaaaaggaatccgaagccggccggaatgttctgttgcggcataaacagggatatccattaaaagcaggatcacgagcgggatcgctactgaaaaaaaagctgttatgtatttttttgattgtctcataaagtgtttcatataggctcctatgcttgtgattctaatcccaccgcagtgtaagccgatgatcctttgccggagagatggttcctgcctgtttgacagccaaagaaaccaaatcaatattactgccgggttcgctgtggacgttcacgatggaggcgaggtaagattcgtcgatggaggtgggccaggcggcaacggtgtatcgcttactgtcctcaatctcacttccatccgccagggtcagcttaactacatttttatcccggtcccgccatggtgcgtaatccatattcaaaccggaaaaggcgtacagaacattgatttcctcgccattgatgatggggtgctccatcagctttttcagattggcgccggtgatttcataggtggtcaggtagtctcccgctcccaatcctctcagatagaagcgatataacattgtaacttcaccctcgtaaaacctcgcagaatttcccgtataataggtggcgtgggggatgagggctatctccgctcctgtggcggcgcgcatggcatcggcaataaagcagctggtttccaggatggtaaaagcctctgccgcagttccaaccgccttctccggctcccggctctccgagatattttcaaccatggcgtccgtttcggcaagaacctgctccagggtcagcctgccttccagatacgccttcagggtttggttgtgaagctcgtttccgatccggttcgcaaaaaaaatatgaccgttttcaatgcatttttgcacgtcccagaattcttcccttaaatttgcctgagcggattttacgctgctcagccccgaaaaaacctccagcagggccttctgcccttcatcggtactgagaaatgccaaaatttccagcagagtctgctttatatcgggatcctccatggagacttttgacagtgccatgctacgtccctgcatcatctgcatccaccgttccccgggtgtatcggtgggataaccgaaaaagccgatctcacattcaggccgctcatcctcatacagggaaaacatagtcagctgttccggcagcatggcgatctccccctcataaagggcgtgacggtttctggtcagactggaggaaaagtcgtcctccaccacgatgcctcggtcatagagtgttttgtgtacctcgaaatacggctccagcaagcccctgcaggaggcctgcccgctgcagaaaagatcgtactgctcccgtctgtccattgtggaaaaaatggtccggttgcagaaacccaggccgaccgagtccggggagtacttaaagcaggggacaaaaggacggataccctgttccgatattttgtcacacaatgtgtagaatgcatctatcgtctccggaatttcccagccgtgctcctcgaacaaacttttgttgtaaaagataccctgtactgaactgttgatagggagttggtagagattaccgccggagctcatgctgttcagcacagattgattgtaaagtgaggtaaaatcctccgctgctaaatcataaaagatattgttacttagctccacatcttttatatagcccgtaaatataatatcctctaaatcatcctgtacgcccggctgacttacatacgactgaatgtcgggaatgctggatttctccattgtaacgacgtcaacatccggaaattgagcctcgatggcaagctccaccggcttggcattacagggagcgtacatgccgatggtgatgacggttttatcaaagtccaccggctcataggataaaatttcgttttccggacagaaccgggccctcatctccttttcacgaggaacgcctgcgcagccgcacaggcaagacagcatggcacaggccaatacagcgaagaaaaacctctgttttctcatttgtcacccctcctcaacgtatatatttgacaaacagtttttttagcgtattcatatctatcggcttgctgatatgggcctgcatgccgtgtgcaagagatttttccacatcctcttcaaacgcgtttgcagataaggcaatgatgggaatgctgccggcgtccgcgtgatccgacctgcgaatcgcatcggcagcctccagaccattcatcaccggcatttggatgtccattaaaattatggaatagtatccactggaagagcttttaaagcgttccactgcctcggcgccgtttgctgccccatcgactgcaaagcccagaccggataaaagctctgtgacaatctcgaggttgatttcgttgtcttccgccagcaggattctcctgccgagcaggtatacgggtaatgccccggtgcccccctgttccggaaccggttcactcagtctggtgcgttccagaggaagctctatgataaaccggcttccttgattcaatttgctctccgcatggatggtgccgttcatcagagtcacaagactgtgtacaatcgccagccccaaaccgctgcccacatgggaggaggtaagggaggactgttcctgctcaaaggggtggaacatttgcttcataaacgcttcactcatgccaatccctgtgtcctcgaccgcaaaataagctttggtatatccgccgctttccgtctgttcccggtaggtcagagttaccgttccctgttcgggcgtaaatttgatggcattggaaaccaggttgatgagacactgcttgatgcggacttcatctcctaaaaatcccctgtggaagttttccggacagtccaggcgaaagttcagcgctttctcggcggcgggatatacctccagctggacaacggtctcaagcagttccttcatatcaaaggccttttgtgaaagccgcagttttccgcattcaatcctgcttaaatccaatacgtcattgataatggagacgagatattcaccggacttttttgctttttgcgcacactctgctacaatatccggtttgtccgcattgtgcagcagcaaatcattcagccctatcacagcggtcaaaggcgtgcggatatcgtgggaaaccttattcataaagtcgctttttaaggcggcttttgcctgttccagtttgatttgctgcccttttttcacatagtaagagatccagactaaggccatggccgccacggttaagagggtaaatagaatcatagtgattacatttcgcattccgtcaaaggttgacctggccgtgatcgaaatgggaactgtaattacgatgctgttgccccagttatccggaaaactttgtatccgccatgtttccccacctattttggcgataaaattgacttcccgctgctctttaagccctgctgcagcacaaggatctgctgctcgtccaccttccgttcccgcagagtatggagcagattataaccgccaaaataattgttggcggttgactttgtcggccgcagttcaatcacccccagccggttcaccacataggaagcgccctgattctcatataaagcagtggctgcaatctcagcataagtgtttgagtcgaccagcataataacgccaaagtactctttattctctatagttacattggaaagaggcgccataaaaacccagaaatcgcctttagtctgtacggtgcagaaatccgtccgaacctcatccgcggttttcagattcttgatttcttccgattcggacagtacgattttttctcctgccagggaggtgcaggagccgtcctcagccagcaggtataaccgttcaaaggccaggagcagcgcctgcccctggtccagtgaccggacttggttatccattatgatgcgagccgcctgccgtaccttatcctcataattttgcctcagcagaaacagcttttctgaaataagggtactcatttgctcgatggagtcaatacgttcattctggatagattggttcaattgacggtatgtaacggtaagcagaaaaatcccgaagatgagcagtaccgtcagtaaaatggtgatacgtctgagccgcggtagaatttttgctccggcattttttgtcttgccatccatttcgcttttcattttagtttctctccccctcagcatagaatggcactacaagtgccagccgcttacgtttatagagtgtaatgccaacactatctccatagctgagaaccgtcatatatatccttaaccgtcttccagtagcctaaccttttgcattcttcaatgatgagctgatgggtatactgaaatatctttgcgacctgttttgcaaatgcgtccggatctccgcctgacaaagattttgctgcctctacacacttgccgtgtatctccagttttcctgatgcgttggccctgtttatcagctttggtatttttcggccaattctataatttttgagtataatcatatagattgagcgcagtgcattcagtgaaatatggtcggttaaaaattccagcagaaaaacaggggccggctgatatagactgccgtatttttttgcttcgtctaaccgcctcattaattgagggatctgctcataagaaatgtgagccgcaacatggtatgccactccctctactgttaaggaaagcagttccaaacactcaaaatatcttctgagatggctggcaattaattccggctccagatgaatatcgtttaatgcatcgatattcttagaaacaaaaattcctttcccccgggtcgcctccacaacaccccacttttgcagacattggatggcttgcgtcgtcgtgtttacactgactccatactgcttctgcatctgggcgtgagaaggcagtctgtctcccggctgataataaccgatcgcaatcagacctaaaatatccaggtatacgctggaatagcgttcttccgctgttttcatccactgttcaagcccctgaacgccgatgcgaaaaggtgaatcagcaggaacgaaacattgaaaatcttcccttgaaatcgtaataaaatgaatgtaagcaaggaaatctttaatcgcttcgctttcaggcgccgctactctgctcttctgaataaaatcgatgagtgttttctgatatacgatgcgtgaatgtaaattgttttccctgtaatccaccccagaaaaccaagagcatcaacgatatgaaggctgaactcgttctcgcatctggcgataaaaaagcgccagatcagtttggagtttttccaaaaaagttctggtatctcaggattcagttgccggacaattttctcgggatatcccaatcatatttgtcacacagagaaatcccatggcatataaatggatagtaaaggatttccgcagtctttaaaatatctgtcataatggggatattgggctctttcaaattgtgttcggaaccacttcccggttctgcctgaccaaaaacaaccacggaaagctgcctttcttttgtctcgatgagtcctgcgtcagacagcattgccaccacccggcgtatcgttttgtcagaaactttatactctttacaaagatctgcataggaaggaagaaccgtacctttcggcatcagtccggattcgattttattctttataatttcaaatattctattatattgatatttgtcgtatttcatctttattttcctcataaggcgttttgtctgatagaacagataaaagactattcatggaatcgtcataaatacaataacagttccgtcctttatgctttgcggcataaagggcctgatcggcgtaatggaataaagcttcatattccgtagcgtgcgcgggagcaagcgaaacgcccatgctcacacaaatatggaagttctgatacattcctccaatcgattgaaaaatacgtttcaccacggaagaaatctcatttttgtattccacaaaaatcaaaaattcgtccccgccgattctggctataatatctgtgtttcgtaccgattttagtactttttgtgctgtttcatgcagcacccggtctccaaacatatgaccgtacagatcattcgcatttttaaaacaatccaggtcaaacagcataagtgcatacttttttccgacggaatgttctttgtcaagcatttcttttatctttctaaaagcaaagttcctgcgatacaagccggttaaatcatcaatgtgagctgttttcttcaaaaactccagttctgtaatttcctcatgaatgtctgtacattttccgatagcgcctgtaactgcatccttattattccctaaccaaagcggacggacaataatcttgaaccatcgccactgcccattgacacataagcaatagttttccgcaacggtagggttgccgggtgaggcatcacgcagttttttccgcagatcttgatagtcctcaactttcattacctgctgaaacagtttgtcttctttcaaattaactataatttcaggtaacccaagctgaaccactccctcttccgacagggttaaaacgtccgtctgatatgtatattcaaaaaggatttcttttgacatctcagcaataaactgatatttaatacgctcctgctccaaaagggctaaagtgcggttggaagcccctccgcactggaggatatttcgagttatttctttgatttcttcttttgtgacatagccgagggatcgaaatttcagctctttttccaacatggggctaatcgctttcatacattcaagcagcagcggattgaacgcaccgcattgcccgctgaaaatcagttcataagctttttggtgtgaatatgcttctttatagatccgattatgggtcaacgcatcatacacgtccgccagggagactacctgcgcttcaatgggaatttcgtcgcccacaagaccatccggatatcctcttccgtcgtaccgctcatggtgccaccggcaaatatcccttgcgattcgcacaatctcctcattcggataatatcgtgtctcttccagcatatttgcaccaatgccgctgtgcgctttcatcttttcgtattcttcctgtgtaagctttccgggcttatttaaaatttgcacatcaatcgaaatttttccgatgtcatgcagtgcagacgcgtttgctattaataaaatttgaggttgaagataacggtatttggcataagaggcgcagagctggcttaacagcatctctgtgatagtacgaatattgaggacatgcatcccgctctccccgtttcgaaattcaacaatgtgacttaaaacctcaaccataataaggttgcttttttctttttccagaacctgctcagtcaccgcattttccagatatttttgtttggaataaagcatgatggtgttggctacacgacgtctgattgtttttggctcaaaaggacggttcacatactcggttgcacctaaatcataggctgcatctatataggaagcagtcgtttctgctgaaatgatgatgaccgggatccgttcaatccatccatttttattcatcatagccagcacttcaaacccatccatctccggcatgataatatccagcagtatcaaagaaatctcaaattgatgaaattccaacagctttattgcctgcagaccattcccggcctccatgatttcatattcatcaaggagcatatctgcaagcagggaacggttcagctccgaatcgtctacgattagaattttattttttaatttcatcccatcaccctttctgctatttatttatcagaatattaatgcattccagcaccaatgcggtcagcaagggatgtcaggctaatttaaggcaattcctttttaaaactatttatgattaaataatttcacaaccggcattctgtgtacctataccaaataagtttagcataaaatacgaaagatgtcaatttaacaggttaatggtcattttatacgatgtttgtttcggaatggaattgaaaagagaatcgagggggattggaaaatctcatcggaacagaaaatcgatttgtattaatttttcccatttggcagaatacgctccaggggattgattgggcggtactcaatttcaagcattgccttgaatgatacatgaggccatttccgcctgcaatccccagtatcattacacggaagatgggataagcgtcaaactggcctttcatcatttcattcatcgtctgtaattgcataacagattccagcttcatatgattttcataatcagtcagcgggatttccttccatgaatttttcattcgagcacctcttatttatgttgatggacggtttaaattccgattctggaagttataattgtttgaaataggattttaattctgatttacagttgtcgtccagttgtttaatttcaatgccacggatagcactttctaaatgataaagaatgacaacacaggtgtttggatattgctccttgagccgaaaaacagcttgcctgctaccaatttcaattaattcttcggctgaatgaacaccaactgaatgaagtttcttttccattgtcttccctaatcctaaagctgtaactgccgccatgtttttctccttttcgttagcttatgttaattgttaaatttccaattcatgctctaaacaactttacgcacaaccggagtaggactcggggcggagtgaaagttaatcagatagccgtctgcaatttttttaatttcctccatattgtgttatgaatatttctcaaagaccccgtagacaatcatcccggcccgctttgcgcttctgaccgcggtcttgtgtaatttgcttagtcccatacaatttctaaacaattaaaattctccggaatgaatggcatgcatgaataaatgtccaattctgtcggacttatttcatttacaccgtcagaacataaccatttacaattgactgttttttctatttagacgactgcatgttcgtacctgttacgattgagtctcccgcaacctatcccatatttcagcaagcgtagggcgaccttcttccttttccaccgcttcatgagaccatgccgaaatataaagatgcagcccttcagccatggcttgccatgcctctgtagttctttcatggcaatcacctttcttaattatatgcgtctggcatataaatcaaatttaacatcccattcaccgtcctctgttaccgtaacatcctgccagtgaaaccgctcgtcctcaattttggcaaagacccattttctccgttcgtcctctatgtttgtaagaacgatgatgtcgtcctgttttctcgcttcaaaccgcatgattcttcctgtatagcaataagccacatcccaggcgtgtgtgtccgggttgtagacacgaagagtcgttccgtattcaaagccgggcaaaatgatcacatcctgtaccgccattccctcaagtacccatgaaaaatgccattcgcctttgattacctgggaagtgctgttgtcaacatagtcaatgttccagctgccgatcagcttcccgaaaaaatcaaattcctcgggtaagacctcattttttgtcccgcttgtgagtgccttataaaaacgctccatatgtaaatcctcctgcctctgtaaactctattccggactaaccggtacttctccattaactgccgcaaactataatcgcccgattcgcctgatttgcccgttacaggtaattctcaattctgcactgctcatgcagggtatcgcccaacagtgtaattgcctgatggggacaatgacagatgcagcgataacacatggtgcagcggttatggtgtactgccatttgattttcaactgacaaattacccattggacacagctttatacatacgccgcagcctacgcatttttcagaactgattttcagtttatcggaataatgctttgttttgtgagaaaaccacagtctctgcccaaataatcccgccatgtgggatagaaatgaaagcccctcccgcggggcctggccgcttttgaatgcctgtgccgctttttttatcttttcttcagcctgcttcacaaggatgcgattctcttctttcgtttttttcagcagtttttcatcgccaatgcaatcaggcattttaagatgtaagccgccaacgattaaagcgccatattttttcaacagtcttgctgcgcagcccgtaccatcgccgctgaataaccccatggtcgaaagaataaagacttttttccctgaaaagacaatccggttgttttccaaaaaatccctcattattttaggaagattgctaaaatatacggggtatgccagaacgatgaaatccgattgtaccatagcttgtaccgccgatggatgttcgatactgatacagtccgcatctgtatccaagccatgaacaaatttctcgatacaatatccggtatttcctgtgccgctaaaataaactcctaccatctcaaaatgctcctcctaccgcttcgcatttcgctaacttctttatatcttcctttacaaataagcgcactccagttcgattcgtcgaacaactaccggctgctgttcaagtcaaggattttacataaatctctttttccgtgtcaagcacaaaaccgcaggacagcagcaggccgcaggaagccttattttccggctccggctgcaccacaatccttatggcgtcagggtgaagggcgatcctgtctgtcaattgcgccacaatcattttgccaaagcctttgccaagacagtcagtttccccaatcatgtagtcaatgctgtaagacccgcccagcgccgtgtagccctcccagagctcttcgctgtccttgcaggcgtaatattgacaaaaaccaatgggctttcctgcatgctccacaataaagtggtgaatccagcaaaacgcgccgtcctgcttctcgacctcatcgatccaatccagcgggtcgtgataccacctggcgacgtgcggcgtatacagccatttcctgaaaaccggcaaatccgtctgttccatttttctaagttgaatcatttcgttttccagcctttcttctttttcagagccacggtgcaatcatggttcccgcgtatattacgaatgcgccttcatccggatcaaaatatatccatgtgccaagcaaaaactggacggcggccattataggctgactccacattactttgatgtgttctcctgcaaaaaaaaactaaaattaagctgaaattacacgatcgcgtatcctgctgttgccagcacacggatggcccgttcaaaatcctcagccttgacaagtatgtaatccgtattgaatgtagaaacagcaaagataccgatctgattctccgcgaggataccagacaactttgacagaatgccgacgagggaaaaatccagcacaccctggatgcgaatcccccgccatccatcctcacgatccgtagtgcttaaaggagtgtcctctgtcctgcaaacaagtgacagttcctcgtccgttttgccgataaagtaaaattcggcggccaggtcgatattttttgtgtctgccaccttgcatactgtcagatgatagggtagtttttttaattccatattaatatcctccatagtgatttgtcaattgaaaaagatatttcaacaatatctcccagcttctttcttttcgccgtttgtcttgccaccactttcaataatttaacgctataacaactgatcatcctataaaccggtaagcgcagactattcataccagattaccgccaggtgtacccctcaagccatccggctgaacattgacgctgaaatcacctgccaaagtcattaaaacagccttttcccgtctgaaatatcgataccaagttcttttgccataccggtctgcttatatggattgattttttccacaatgccgtcatgccggaaaagagagcctgtgttcttaaaccagaacgtcacccccgcactcacgcattgctcccggatgttcagcacccactcataatcgcactcacgcgctgcccgccctgtttcgccgccaacggtaacgtgagccataccatgaagatagggggtgaggtcgattgcttccagaagcggagcgcaggcaatgaaacggcgcttcatcggataagataaaaacagggggagccgggtatcagccagcgcctggttttccaccgtgcagccgatgttcacattgtcgtagccctcgccccagtcagagggaagggataccggaaatcggtcaatccgcttgcttagaatcaaaaaatcaatgtccgtccgttcccggatcatggcccagacttctccccgccattcatccgcttcgggcaggaaaaagtcggtggcaaagcaggtggcgaggatcttatcccccttgatattgtattcgccctttttgtttctcctgacaggccagtcgaatttatccgttttcaaaattgtattctggccgtatcgttttgcatacggcccgtaaaagtaacagtttgcgcagccgtcacttatttggtaacagccagtccacggctcccagttcataggcagcctcctttcatgttttttcttctttttcagtttttagtgtttcataaatgttccatactgaatggggccgcgcttgtatccggcgatgtattgtcgctgatcgtccattccccggtttccgtgtcctgggtcagataaaaatactgctgcgtgtggccgtcgtccataaaggtctttgtgtggtcgtactccacataatagctcgcccatacgacaacaaagtgttccgcaaggtactcgtccgtccagccacgcgcctgggcaagctcgctaccggtatacatggcaatgacacgtgctgtttcattggtaagcggcaaatccgcaaaggatcagcagcgcggcaatcaccgcgacgagggtctgcatccgtttcatgcttctggagcttttcgttatatttataaaacttctctcctttgcttcaacaatgtatttatcatcaatcgtttctagtgcatcaagaatgtgacttgcgttcataccactccctccttttttaagaaggaacacattccgaaagctcgtcaagggcaagggacacttcgccgccgccacgcttgtcccggtggatatcccgccatttcttcagagatacgcgccgggtagcccaatataaatcaacaattcggttatcctccatctcttcacctcctatggtctttgtaaaggcccttcacctatctacttcccgttttttggctttggttgcattatttccaggaaacttgacatttaccaaaaaagcagcagaaaccatgccgggcttctgctgcttactgttatttcattgtcagccataaagcaggccgcacgccgcctctgttatcaccggtcgcaggatggaaacaggaagaaatattgcaaaggaaaatattgttaccctggatacctatgttgccatcgccatgaatatatacggcttttaaattattgcgcccgggtgagcgaagccagcaccaccatctatgacctttaaatgctgctgtccgattaccgttgtatggcggatcgtcctttattatatattctttcatcttttatctccaataaatcaaacctcatgtcagactctggggactgccctgcctgctgccattgtatactttatttggcgcagcatgtcttactcaacgataacctgcacgctccgcttacaggtcaccgtcatcaataaaagcatggctcaaaatataaaactcttcctgactcggttgatgtttcttttccattttctctaatgtatcgtcatacttccgggcctcttcctcggaaattgccataacagggctgtcataatagaaccattttctgccgtctaaccgattgggtgccaattccttcaccatcatggcagccggatatctcccatcttccatgcagacattcaatttcttacagcttttaaagccatggcccacatagttcatcgggcttcccaggataacaattacatcatatccaagcagcacggcctgttcaaaggaatgctcgataagcatctttccataacccattctctgatattcaggcgtaatgctgaccggaccaaaggttaagatttctttttctgttccggcttcatcaaccagccgggcttttgtatacattatattaccaatcacctgatcgtccagttcgattacaaaatccagttctggtatgaaatcctcatgtccgcgcatggtgtgtaccagataatgctctacacaccccggaacatagagattataaaaggccttcctcgtaattttttctacagccttgtaatcgctttctttttcatttctaatctttatcatttcaacctctcattttacagcaggtagttattttcccgattcgcaacttgcaaagtaactaatttatatgttgcatatccgccaataaccaaaggctccattttgcaaagttcttctgcttcttcacggctatctgttttcagaatatacatacctgccattcctggatagcctttaaacacaccacagatttccagttttccttcatcgtccagcttccttatattttcaacatgttctgtaactgccttctttgttaatttattataggtcttgcttttctcaatcagcatcacatacatcaacttttccattccaatctccattccgcacgccttcaggcccatcataaaatattggctctataagacttatgctcttcattttaagactgccggtatttcatttcatacatctttctgtctgcctcccggagtaaatgttcaatttccgactgttcatccggatatctcgaaaagccgcagctgacgcccggatacaatgtaatgcccgataccagacagggcctggcaatatccgcagtaatctgttctgtcagggcattataaaattcacaggatttctgttccggtatgacaatcgaaaattcatccctccgatccgaaataaaaaatcttcgtttctaaggcattccctgattcgggaggacacttccactaaaagcttatctccggcatcgtgtccgtattgatcattcacctctttaaacttgttcaaatccagataaagcacgccgaacggctgcttattttcatgaagttgtttcatgattgacatgaaccggcggacattgtataaaccggtgagcggatccgtgttcgccagttcggtcatctttcttttctgacggaggatggtccatcccccatacaccagcaggatgagcagcacatcgattaggaccgccgcaatactttccaacataatatttttacatgaaacccaccctgttttcggcatcattttaaaaaaccacgttccattgggaaccgatatgctgccttcaatcgctcccgacatatcgttttctgtattggcggatatgatttgaatttcatcttccggcgttatcttatatatctgataggcataaccccggtttgacagatttttaagttccgctctgtgaaagatttccggtacattcagaacggctatactgaagccccaaaaagtaggttcccgcctttcattgtctaaataaatcggttttctggccaccagccccagacctccctgggaaagctcatatgggcctgacagcgtcatctttccggtgtctctggcatattcagcctccgcctttctctccgggtggtcaaaaagactgccgaatgcattttcgttgccctccaacggataaacgtaggtcacaatcccatccggcgcaagctgtaaactgcggattgcgggatcattttcatataaacgctctgccgtcatttcaaattccgtaatcgtgccatggttattgacgataatcatttcaaaaatttccgcgcttaacagccgggaatcaatcgcgtactggatcttactgatctcgctgagcattacgtattccgcctgctgaatatttctcttcttttctgcccttgccagcagcgctatggtaagaaccgacagcagcataagtgaaaaaaacatggcggttactgtcctttttttcatgcttctctccccattacctgagtgagcgtttcatacagaatgtttacatcaatgggctttgcaatatgggcatccatccccgcttccatagccgttttgacgtcctgctcaaatgcgttggcagtcatggcgatgatgggaatgactttggcatcggtcctgccgtccgcgcggatgatccgggcagcctcatatccgtccatctcgggcatctggatatccatcaggatggcatcgtaagtccccggagccgcggaaaagaacgcttcgacagccagggccccattgctttccacctcagttattataccgcacatacgcaggatttcgcaaataatttcagcgttgatttcattgtcctccgctatcaggatacgccgccctgtaaaaaggcctttccccgctgtctccggcagctgcggctcccgtaagggcctccattcgccggactccacgacctctcctttcagttcaacaaaaaaagtggtgcctttttccggttcgctccgcacggatacgctgccccccatcaggtctaccagccccttgacgatactcaggccaagtccggttccctccacacgtgacacggcccggctgcggacaaaaggctcaaaaagatgatccaacgtctcttttgctatgccgatccccgtatctctgacggtgaagcggtaacatgcctgtccagagcctgccgccccgggaatctcctccgccaggaaacgcacgctgccgccccgcggcgtgaatttaaccgcgttgcctaaaatattaataaggatctggctgatgcggagggtgtcgccataaaagcagggatttcgtatcccgcccggaagaatctcgcagcaaaggcccgcctgttccgcctggggcgcgatgatttccccaatctgcttaatcagatccggcagataaatcttctcccggttcagcgtgatctgtgctctctcaattttattcatatccaaaacgtcgttgatcagattcagcagatgaccggaggccgcggatattttctgcaggcagtccagaacccggacgggatcgccgctgttggcctttgcaagcgttgtcatccccatgatagcattcatgggcgtacggatatcatggctcattgccgacaggaaatcacttttggccagactggcctcccgcgacagcttgagagcccgttcaagctctgtcttagccgcccgctccgcggccagcatatccgtcacgtcggatcgcaccaggcagaccgtcttgtgattctggtctccccacaatacattgacctgcttgtaccgcagactgtccgtcacctgataaggaaggacaaaatcgtagccttccggcttttctgcaagcctgtggagcagggtttcgaggcagaacatatgttttacttcctcatggctgaccgccgtcccgtaacatccggccaggttgtcaagcacctcgttataattctgtgtggtgtggggcggcagattctcaaggatcatctgtcttgtgtacataataaagcttcccgcagccgcatcgataaagccggccagttcgcaggtgtaagcgattaccctgagcagccgctgctgctcccgtatggaatcggtaatatctgtcctggacaggcataccctgcccagccgcaggtcaatgggcgcgaccgtgatattcttggtacggatgtccccgttatcgtccatggaataggaaaacgtataggtctgcccatgcttcagccgctccagcatgcgcccgggattaaggccgtcccggaactgttcccggtccctgggcaccaccccggactgcagcagcctgtctacccggaatgagtgaacgccctggtgcggcggcacacagcaggctttctcatccagggagataatcttgtacgtgtcccgcctcagatccacatccgccacaaaatcataacctgtgacggacaactgacagctaatccggttggaaatggtctgctccgtgatatcgaggactgtcaggatccccgtgacgtcgccgctgtccggcgtcgacaccagattcatctccactctcacataccggccggttccttcattcggcagcttgacaaaaacatcctgtgtccgtttcgtctccccccgttcaaaagccgccagtgcgggggcgcgcaggtaagtgttccggaagctctgcctctcctcctcatcttccaccagagttgacaaaccgatgaaaaaatcctcgcgcacggcgccgaatgcctccagcaggcctgcgcctgtctggtcgctgatctgtattatccggtcctgcgtgatattgcagtggcccgtcacaaggacgttgggatccgaccgctgatgatggcgcaggagcaggtcgtcgtactgctgacggacgcgggcccgttcttcccgctcctttgtcatgtcgttgaaagtggaatatatcttcctttctccgccctcatgctcgatcagagaaagggtattcttcacccatacatactctccgttccctttcaggagccggtactcaatttcccaatgatttttgccgcttacaagatatgcatccagctgcctgcggacgccttccagatcgtccggatgtacgcccgtcagggcgtcctcttgatacagttcccaggtatctttgagcgtcatcccggtggttaccgccagaccttccgatatatattcagggacaatgcttccatccttttcgtaacggaccaccaccacgccgcccggaagatttttaagcgtattctggaaatactgctccatcctcctctgctccgttacatcgctgtagacagcatacagaagttcagttccatcgtggtggacccgccgggaaccttcgatgcaaatccaccggtattccccagttcgtcgtggaaaagccggcaggtatgccgcagcgattctccgcctcccagcaaacctgccagattttcctgcagcgcgtcgcggtcatcctcatggacaccgatgaagtccacctgctccatgacctgtgcatgcctgccggaagaccccagcaccttaaaaaaagccgggttatgataaagcggataaagccgtccctggtccacacggtagatacacattccgctgggaataccgtcgagaactgatttcagttctttgttcatcgccgttgtcatcattgcgtatccctcctattggcccaagataaaatgatacaggacctgaaacaaccgttccggctcaatgggcttggccaggtgggcgttcatcccggcagccttgcttttttcgatatcatcatcaaaggcgttggccgtcatggcaatgatggggacagtcccggcatcgcggttggtcagatgccgtatattcttggcagccgtcagcccgtccatcagcggcatcctgatatccatgaggatcgcgtcgtaaaagccggcttccgatttactgaacatctcgatggcccgcagcccgttttccgcagtatccacggtaaatcccctgctctccagcacgaccgtagccacctcggtattaatggcgttgtcctccaccaaaagaaccctgcgccctgtgaaatcataaatttccggtttattctccgcctccttttcctccttttcaccgagaaccctggaaaaggcggaaaccagggatgacttgaacataggcttgctcatcagcagattcaccccggccgacctggcctcatgttcgatggccgcccagtcataggcggtcataatgatgatagtgacctccggtcccgccatggccctgatgcgccgggctgtctcgatgccgtccatttcaggcatcttccagtcgatcagtatcatatcgaaatatcttccaaggccgcacagctcctgtacccggccgatggccttttggccgctgtccacccattcggcgatgattcctatttccttaagcgtaaccatcgcgctctcacatacggtcacgtcatcgtccacaaccagggttttcagcgcggaaaaattgggattttcctttttcctcttacggcggcgcatctcttcctccgtgatccccagttccacatccacggtgaattccgacccgattcccttgatcgagcgcacggtgattgttccgcccatcatatccacaatactttttgatatggcaagccccagaccggtgcctccatacagggcagtggtgcccatggattcctgcgcaaagggctcaaacatatgacgcaggaagtcttcgccgatgccgatcccgttgtcgttgacggtgaaacgcagtccggccatattgcggactttcctgcggaccatggcggagaaagtgaccttgccgccctccccggtaaacttgatggcatttgataagatattgagcaggacctgctggagtttcatggcatccccggtataaacatcgtccagcgtgggatccgcaatacattcgtaatccactcccttggatgccgcctggctgtaacagatggcattcaggccgtttaaaaaatcctccgttggaattttttcatttttcagaagcatttttccgctttcgatccggctcatatccaggatatcgttgatgagtgagagcaggaaccgggatgaaatcccgatttttgagatgcactcggcgacctgctcgtcattgccgacagcctgggcggcgatggcgctcattccgataatggcattcatgggcgtgcggatctcgtggctcatccgggacaggaagtccgttttggccgcattcgcctgttctgccgccgtcagggccgctgccagggcctccttctgctgttgttcctggcggatgatatcggtgacatcggtgcgcgcaatgcatacgcgttccagttcccggctgatataaaagacctgataccgcttgacgcgcaccgctccatgttcatcgcgggtctgcgtcataaaattgtagctgccgtgtccgtctaattcccgcttcatgtattcagggtctaattttgtaagatattcctgcgctgcgtcttcatccataaatgatacggcgatttttacggcttctgcctgaaaccggcccttttccggcatcatcccctcggcgccgggatgggaggataccacatgatacgtatcattgcggatgtcaatgtcggaaagaagctcatagtccagctcggtcaccttgctcaaaagctgtctctgtattttctgttccgtgacatcgctcgtatagaagaatgcgatcaggtcgccgctttccggattctgatagaacctgaaattcgtcctgctccagaagattccgccgtccttgcgcttgcgcagatattcaaaatcataattattttttccggccgcaaattccgccgccacatttgccctgtcaagggcggtcctcaggtatttgccatattccggttccgaagcggcggccgccagtttcccgattgccttctcataggtttcccccttctgcgtgatagcggcggcttctgtggaatgataactctcgaccctgtcctgtgtaatattgacccggccctggatacttccctcggctgaagccgcctgaacgaaataagcgagttccttctcgtagagttcgccggcccgcttctgggccagcttctcgtcggtgacatccacaaagacgccgtagaaataacgctctccgtcatcccggacatcagctgggccttcagtgagatccatttaattttcccgttcttgcagaccagtcggtgttcgtcccggattgtatccccgcggcccctgtccgccagcagtttttttcgaacggcgtccagatcgccgggatagacgacggaggccatccggttccccagcgcggcgaattcttcccttgtatatcccaacagctcatacaggccgtcgctggcgtctgcgacggtaaaggtatcgtcgtacctgacgcggaacactgcgccgggaacattgttatagagatgcataacctctgcctgggccgttttctgcgccgtaatatcgaggcagaccgagataatggccggcatgccgttttccgccgtgatcctgcgtcccagatcgtggacccagatataggagccgttttgcttcttcatccggtactcgaccacatattcgccgcgctccgctatctggcgggcaacctccgcgtccaccgcggcccggtcgtcgggatgcatgcagttggaaaccataccgccgatgtcggagacaaattcctcctcaccggagtagccgaggtacttgagcatccggctgttgataaagtaaaacggaaagccctcttcgatgtatccgcccatcattccgccgggcagagaatcgccgagcagttcctggcgctgcctggcaaggttctccacgaccagtgtctggggataatgttctccgccctgctggctgactcccggttccgagaaccacagggtgcgcagcctccagcctccccgtccgccaaccagggtgaaaaatcctctcagccgccagcagtactgcgaatttttaaggttcatccatgcagataaattgtaaacttcatcatgtatcctctgctcctgaaagagcgtcagcgtaacggaaaaaggttccggtatttccctgatatcttttgctatgtattctttcatctcctgaagactgtgcgcaaactcatcctctcccgttcccacaaagcagaattcattgtccagaaagaggctcgtctcctccgcgctgcgcctctcaaaccaggcgctgcagaacgcctgcagagtctcccaggcagtcattgctgtttccatttcctttatcctttccatggcaggcaccctcccttgccgccggcttttgcagcgtacaatgcttcgtcggcctgccgtatcatctcatgtatggactcttttgcatgccagagcgtgacgccggccgaacaggccgccgtatcaagctccgcataacggctcttataaaaggccctgcagatggcagtcccctttttccgggcgttgtccagagtgcgcatccggcgcatcaccacgagaaactcatccccgcccatccgtaccaggatgtcctccgcccgggtgtgggcgcgcagcagggaagcaaagtggataatcagatgatctccttcctcgtggccatatttatcattaaattttttcagatcgtccaggtcaaacataaagacggccgaatcggcctcctgacgcagtgtttctgatatggcgtccagacctctccggttgagcaggcccgtcatggagtcccggcaggcctcgtcctgcagcacacgggcccgctcctgaagggaatggatgctgactgcccgcagaacccgctttcgcagcacctcctggctgtggggttttaccgcatagtcggcggcgccgtgttcgatggcaagccgctccagctccatgttctgaggccccgtgacaatgctcggaatctcccagcctccctttgccttctggattgcgtccaggatgcgcataccgtccattcccggcagggtcaggctcaggatcgcggccgccgtatcagtccacctgctccccagcgcttttaatgcctcctcacagctggcggcttcccgcacctcaaacgagtcggaaaaggttctgcatacctgggcgcggtaatctgcgtcctcgtctgccaccagcagcagtctctctgtgagcagcgccggagcggctgccctgctgccctctgcgctcccggccagagacgctttgcacagtatcttctcaaattcctccaccggcatcggtttggcaaagtaatacccctgggcgtgatcacacccgtcgttctgcagccgctccaactgctccctggtctccaccccctctgcaaccacactcagtttcatccagcgggccaggcttacgatgaagggcaggatgccctgggcggccggcctggtaatctccgtctgaatgaacttcatatccagcttcagtacgtcgattggcatttccgtgagcatattcagcgaggaataaccgctgccgaaatcgtccatctcgatgataaagccaagcttccgcaagttgcccagcgtctcgaacagctgttttgaagtttccgtgcaggcgctttccgtgatctccagatgaaggcgggagggcgacagttcataccgctctgtgagcccgatgagaatcccggccaaatccacattgtggatatccatccgggagacattgaccgagatactgatgccgggatacccgttccgatcccactcctgcatgagggcgcagacgcgttcccagacgtattgatccagccttgttatgaaaccgttgcgttcgaaaatgggaataaattccgacggcggctgcagccccattccggatggttccagcgcaccagagcctctgccccggaaagccgtccgtcccagatctggtacttgggctgcagatagacctcaaactgtcccgtggctagggctgtctccattccgtccgttatggcctggcggcgcagcagcgtgccacggagtttgtcgtcatacagggcgaagtgcctgccgtactgccccttgatgctgtgagcagccagcagggccctgtcacacatctgctcaacaggaacctcgcggtcctccaccgtatagatgccatatttcatcactacattttgatcccggaacccgctgttgattctgctgtcggactgagtgaacatctcatccgcatagtcctcccggtgctccaggagacaggcaaactggtctgcgctcaggcgcccgcatattccacgattccccaggctctgggtacaaagctccgctacctgccgtaacagacgatcgccggcggcgatgccgaaggaatcgttaatcagcttaaaatcttctatgtcggaacagaggatgtcatatttcacgtcaggatttctgaacagtatatccctgacctgctgataaaagaattccttgctgtacaccccggtgacccggtcatactgaatctggtgaatgagggctgagttttcccgcagccggatgatgctggctacccggtgctgaatgacctggggacggtagggtttggtcaggaagtccgtggcgccgtgggaaagggcggagacttcatcggactcgctgtcgtttgacgtggttacgatgaccggaatagaagcaaatcgggcgtccgctttgaagtgtttaagaaaggtgtatccatccatgacaggcatatggatatccagcagtatgagggaaatcccctctctgtatttctccagaaccgtcagggcctgctccccgttttccgcctccagaaccgtatatccgggagacagaatggagcacaaggtcatcctgttgatttcattatcttccactactaaaatcttcttatccaatatcatggttcttcacctaccctctttttcgtccgcccatcccggtggacatgatcttatggcaaatatataatatatgtcaatttcgatgacaaatttatctattattttaactcttatagtttacttgattttaaatataagcgcaagtatcccactttaaagtgtcaatgacaaattcagatcattttgaatgacattttattgtgaaatcaagcagtttgtgttatagttgacattaaaggaggcagaacgatgcagttctatgaaaaactggtttttattatgaatctgactcagacgtccaacagaaaactggctcaggcgctccgggtggatccctcaatcataagccggctgcgcaccgggaaaaggggcattccccgcaactcggaactcctgcgcagcatggcgttatttttctccgaacgctgcaacacggattatcagcggcgcgccctgtctgagatggttggagtcaaacggattatcacggccaagcgtgactatctgtcggaatttctctttcaatggctctgcggcaatgcggacggcgtcgaacggttcatgcggacctttgagtctcttaaaatcggcgccgccgcatcaaaggccgacctggatccgaaaacgttcagttccaaagggaattttgtttattatggaaacgaggggaaacgcgcggccgtgcgggccgcataccagcacatgctgtcccgccgggagccgtgcacgatctgtatcctggccgatgagacggacgattggctgatggaggattacgactttacggccagtatgcaggccggactgttgtcttgcctggaacgcggctttcagatttaccatatcataccttccatctattccggagaccagatactggaatcactgagccgctggataccgctttacatcacgggaaaggtaagcgcatacttttatccgcatatccgtgaccgtctgcaccggcataccatcattctgatgcccggccagattgcgcttgcatcccactccatgtcgggccagagcgccagctatgcgtcgatgctgacgacagaccccagactgcttcaggccattgaagcagaattccaagattatctgtccctgtgccgtcctatgctgaatacttactttaaaccgcaaaaactgctccaatgttatatgaactttctctcttcccatggtttttgtatccaaaagatacacggcctgtccagtgtgaccgcaccgctggaattgactacggaatccattgaacacagagaggatgatgaactgaagcggttgggcgaggttttttatcaggaacagaaaaagcaggaacaggagcaggagcagtacaatatgatcgacattggcattctggacagtgcagacaggatccgcgccggcgatatccccatccagtcttcctatggggcggggaaaatcctctactatacgccgaagacgtatgtcctgcacctgaaaaaaattctgcaaatcatggagacccatgagaactatcacttcgttcccctggaagaacccgtccagtacgaaagcgccattctggtgaaagaaaaccacagggcgcttctggtccatgcttctaagccttttacaatcttcgaaatttcccagcctgagattgtagcgctttacagggaatatctgctccgtctggcggaaaaacagggatataccgggatacaccgcaagcggattaagtcgaggatccgggaactgatacgggaactttcagatgactaaatatataaccgcaaaaaataaccgccggaaacggtaacctgcacgctccgcgcacaggttaccgctgtctacagagaaagaatcccgctcgcgatattctccgcagagcggtttttatttaacaggagaactttcctgttaaataaaaaaggacactgaaaaatgctgtttttcagtaccctcttgtggaatctaaagaatcctttcgttgctgcttcctcccggcagctttcatagccggattaaataccgatccgctgcataagctgtgtgaccgtacgtgtccgttcctccaggtttttaccggaaaacttagacagcctgcattcacttgcgattgcgccgtcgcacaggaacaggacccgttctgttctggccgcaataccgggatcatgtgtgaccagcagaattgcggtgccgtccttattaatccgggtaaaaagctccataatttcacgggccgcctttgtatttaaagctccggtcggttcatctccaaatatgattcccgggccgcccaacagagcgcggcagatgcccgcccgctggagctggccgccggaggcctgagtaatctccctgtccttaagctcaccgatacccatctgtttcatcagcatttcggctttctccgtaagtttttttatatttctgcggttgtcccgcatctgcggcaaaaggatattgtccaatatactcagattttttaacagggttggctgctggaagacaaagcccattctgtttctgcgcaaatcagaaagcttgtcatcggacaattccgacagcttctgattctcaaagattactttcccgctgtctataggttccatgccgctcagagtataaagcagcgtggattttccggaaccagaggggcccataaccgatacaaactctccctctccgatctcaatggataccctgttaagcacgcttcgcttttcagctccgtttcccagggatttgataatttcaatgccggctaacaattggttcatatctactcctttatggattcaaataatttgacgtcgcccgcacgggatgtgcccagtaccaccgctaacagagcggtgagaagcagaatcagcggggaaagaaaataagtggatagcggatcgactgtaaaccggaaggtttctgctccgaatgaggatatcgcggcggcagccagattttccccaagagttccggccagcacggttcccaagataatccctatgctcagaacagataccgctcgccacgcatactggaggccgatatcggatcgggtatagcctatggcccgcagtacggaaatggaataccggtcttttgccactaaaagcttcataaacagcagggtcaccagcagggtgattaccgccgccgacaggccggcagacagagaggctgagcgcacggaacggagtgtctggccgaaggtctgcgccatatattcatctattcccgaaattttcgcataaggaaatttctttgagtacttcaggttaatgcgggacagcatgctcttatcggccagattggcgcagacgatgctccactctgcttcctttgaatgatctgcgaaagcggcctttgcggtctttccgccgtttgtgatgtccgaatagataccgcagactgtaaggctgcgttccccgtcaggcgacagcaggataattgtatcgccgatatttttccccagctctttcgcgttgagcgccgataaggcgatatcgctctccttagccggcattgtgccggacgcgtaccggagggggaatgcggtatgatctccaagttctaccttcaggttttcggccgctccatcctccgtcctgatctggtaagtctttgagacaaagagggcatagtctgcaatttccgggtcctctctcataaacgctcctacttccgccgtcttatcttcgatttggccggtctgccggatatcgagcctgaggtcacaatccccaactccaatatatgtgacaaaatcttctccagaaatagtatggtacagattctggggcacaatcatgataaagcttgacagcataataacaaacagcatcgtggcataaagccgttttctggcaaggacatcatttatcgcaagcagaaagttcaccgaacatctgcttttatttgacagcctaaccactctgaagccgtccgacgcaccggttctgcagacaaacctgattgcctgtacggcagaaatctgatggaaacgccgcaggttccagttaacatacagaagaattaacagaaatacaagcgccgcaccggccaatccggccagcagagaggacgccccgcctcctccgtcgccaagattcagccggatgccctcacgcatcggtttcagcagcaaaattgaaagcaggaatccggcagcgcttccggcggcggcaaggaacccataaaccgccaggtaaatcctcctgatgtcggttacccgcattccgactgccttcataactccaatctcccggtaatcgtcctcgattttggccagaagcgtaaaacggacacaaagcagtgcaataaagatgacaagaatgccgaccaatacaataacagcaatcataataccgtctgaaacggcgcttatcatccgaaacaggggccaggtgagcgcaggcccgttggatgcaagcccggcggcactgtaagccgcctcaaaagtgccgaggcctgataagtccttcagacggaattcaatcaggtattcggcggtgccaaggggttctaacagggagtaatccgcttcgctcacaacaaagcgtttagaggatgcaagggaagaattcatctgggaatccctcacgaatccggctacggtaaaaatatggccggacaggacggctttatcgcccgcctttgccaccccatccttgtaataacagacaggaacatagatttcaccccttcccggtctcaccggctggttatccgggccgagaaggaaatcgaaccggccgctctggacgcagacaccattatcctgtacgctgccggcaagggaatttcctccgatgcttatatgagcgttattgagattcaaaaaattcagaacctgaaaatccgccacattggcattatcttttgcaaaggcttccagctttgttatgcccgggtcgccggtatgcatctgcataaaatgtggcgtctgggcatccatcataagctgttccaccgctccggccaggtttgccgtgagaagagccgaaagcgaaagcagcatggaggcggcagcaataaaaagcatcgtaataagtgaaaccgccttatttcctgagaggttcttccggatcattctgcagcataccgcattcttatggcttatacgctttaaacggctcatatgctgcttttgctttcacttgcctgaaatgctgcttcaagctccgtaagctcccctgattcagcccgagaaggcgttccagcagacagaggaaagccctgattttttccgaacgctgtgtcttaccgagttttaatatattgtcatccagcatcacatccagatagcacagtgccatctccatggattccagaggatacggtgcatcaaaaatgccttgcgcgattccgtcctcgacaatgccggccattatggcaggcacctgtctgaagataacccgctttgtcttctcgtgcatgagtgcattttgaggctcgtgcagatgccgtatcatttccctcccctccgtctgttccgtgtccatgtgaagggccaggacagtgcggagcattctctcatttaccggcatgctttgatctccggctgccattttagcttttttaagcagaacggaggtctgacgctcaatcagcgcatccattatttcctcttttgacttaaaatgatggtacagcgttcctttcgcgatacctacagccgtcataatatcagcaacgcttgtatgatcggctcctttttcggcaaatagaatcgtagccgcatccaatatctcatttttccgcacatcggcgtcctttattactctcatacttatcctcctataacagaccgacggtcggtctattatagataataacatacgtgagccattgcgtcaaggaaaatggcagtttgctgcctccccctttgcggggcatctcttattttagtgaatcaacaaatgctttcttatataccggatacataaaatcttcgaatggttccgctgctcaaataaggtggtactcgccgcaaaaaaatgttatattatagctggcataccaatttagttatatgacaggaggagcagaaattggaaaatgaaatggaattgcagcagattatttataaaactctggctgtgcagatagagtttggagtgtaccgctttgaagagcagctaccaaccatagaggaagccagccagctatttttagtttctaccgatactgtccgttcggcctacctgcgtctgaaacatgatggctatatcaccctttccagaagcgtgggcgcattggtgaaggtctgctatgacacagaggataccgaccgccatatacagaacttctatgccatcagaaaagatgctctgattgaattgagccgctccatgcgtccgctgttaagctatgcccagtgggttggtttcagaaaggcttcaccggaaaccctggatcagatggaggctctggctctccgtacggatattctcccgccctacagaatgatccgccacctgcagcttatttacggttctcttcaaaatgagcttctcatgcgcatggtttggcagatctttatgttctttcaggccccactcttcagcatcaggtttactgcaagacggtatgagggtgataattccctgttgtatatgatccggctgtgccgtcagaaagactgggccgcactccgttcatccatagaaacctttcaggagcagctttcccgtgctttgtgcagtttctatgacagcaaaatcacagtgcaggctccggaacagcagatcccctttcaatggacaagctacaaaaaagcaacccagcgctgttactcactcggcatggagcttttgaaggccatcaaccgggaaatttatccggccggaacctttcttccttcccttgaaagactggcaaaggaacggcaggtttccgtcagcacaatcagaaggactctgacactgcttaacagtatcggcgttacgaaatccttcaacggtctgggaacacagattctcccacaagaagaaatagcggaaaactgtgactttaccaaccctgttttgcaaaggcgtcttctggactatgcacaaagcatgcagattattgccctgtcctgccgtgaagtatcgagaatcactgctgccgcttttaccccgccgaccgggcccttgttatggaacggctgaaattactgcagcggcttggacggcaggaactggcttcctacggcattcttgagctcttcacgcacatggctccttaccaggcaatccgaaatatatacactgaactgtaccaacagctattatggggatatccgctgcgcagcatcattacggatcaggcgcgccgtactgcctgtattgcgtatcttgatacgtttatggagtgtctggagcaatccgatgttgaaggtttatcggcccatctggaggaatttattttttcagaattaagatttgcgtcagcggagctggaaaagctcggcatcgggaatgtttcgccgctggcgctgcgtgattttaatttatctttctgatgacggacctgaaggctgacacccaataaggaagtgttgaagaacattcagattgggcagtcggcaagcggaatgtgataacaaaagaagggctatcggcggtaagctgatagcccttcttttgcattgagaaggccacggctataccgtagccctcttaaatgggtttccggatcagccgttgttatcttcctctgtcagcctgctataacgaagcttcgtctgcttgcaggacaccggcggttttggcatgcgctcccggctggtacttatccacgatttcagccttgccaactcctagataaactagaatttgtttgtatctgatttccattaacaatcactttccaacaagcaggaaattcccaatacttttctttgattcccatatatgaagcacttgctttacctataatcatagaaaacttatcactttcaatataatcaaaaacttcaataagataatcaggaaaccaatcaaaataccctttccatcctgttttcatttgttccttattttctttattaccataggtatcaatgaaatggaaatcttctgacatcatatcaataataagcggcatatcttgagtgttaattgcttccacaaatttcattacagtatcttgcttcacgccataccctccatacaacttcaaattcgctgctatgaagctgccttacgcacattaacctctgcgcaaatcagtttcgctatatgctccgctgtttcatttgtaagcaggaaaaacattccatcattccggcattttttatgcgcgttgccattcaaggtataaacaaaacctttcacacaggtatcgctgcaagcatttggatcaataagtctcttgcagtcacgggaagtagtcattttcttctgcatatcggcaggcagggaagcgatgatatcttcatatctgcccgcattgtcgccataaatccgtgccagaatgcccgacttgcgaaatacccagttcattacggttttcttctctagtcgatatgaagcggtataaccgcttttcgcttctttgatgacgagttcacagccctgttccataagtttgttatcaagtttcttgacaaacgcttggtattctggtgcaactgccgaaagaaactccttgaatgaacctttttcttttgccattatctttatctccctcaaattcatatttatcattctgctttcttccattctaccacaattccgagagcgtggaaacagagtgttttccgaacagcatttatttcagaacagccagcggcgttattctgcctgtatatgtgagtgtcagcctatgcatggcgcgtgtacaggcaatatacaaaagacttctgtcatagcgggatgaatatgttctgtcatccgcctgggggattagaacttcatcaaattccagaccttttgacatttgaaccgaagttatggtgactccgtttcgaaaaaccgagctctccggcgtgagcagatttgcttcacacgatccgcccagctcattatataatgctcctgccaatatgtttgtttttaaaatgattccaagtgaagcgctgcctcccttccggaatttttggattgcctctttgatcactctgatttcttccgctgtgtcctggcacgcgattagttccggctgttccccatggcgttcaaccggctctaaagccgccacttcctgaatgcgcttcgcgaaggagataatctcataggtcgaacggtagcttttgttaagctccacaaactccgcttctttatatagctcctgaagatccgccagactgtgcaaatggttgggattgataaattgtccgaaatccccgagtatcgttttctggcaggggaacatgcggtttagggccgcatactgaaccggcgtgtaatcctgcatctcatccaccaccagatgtttcgtaagactgctttccttcactccctcgatcacggaatgaagatagagaaagggataaacgtcggcccattcgagggtctttttaaacggcatgacaagcattgaccggttcccaattcttttataaaagtccttatatacggcaagcgtatttttcattgtaagcatggaacccaggctttttgctaccgtcctggtccgcagcggggcgccttcagcctccataacagcctccgtttcgtagcggtcacggatatcttcagcaaccatcaaaagccgctttctgacaggatatttgctatacgcgcgaaaacgtttcattatccattcttcttcagcggtaaagctgccgaaaacgaaatcggcgggtttgaaaatcaagtccggcaattgttctatgtaccgatccatcatggaaacaaattccatcgttgatttaaactgcactctctgcgcccacgcttcatcctgccgctcaagcggatctttatcaggttcaaattcaatcaaaccttcaagctgaatcttcgcaagctccgacagattaagttcgaaaatcggctcctccccaagctccggtattacatttgagatgtaatcgccgaagacacggttaggggacaggattgtcacattccgagcgttcagcctgtccttaaaccggtaaagcaggaacgctatccggtgcagggcgatggatgtttttccggaaccggctgctccctgaataatcatggtaccttctttttcgtttctgataatccggttctgctccttttgtatagttgaaatgattgatttcatcttttcatcagatgtctggcttaattctttttgaagcacctcatcctgcacatgagaggaagtctccagcgcatattccatatgaccgttttttattttgaactgccgcttgcgtgttatctccccgaaaacagggccgtccggagcctggaatccggcttttcccacattgaaatcataaaacatgccggatataggggcacgccagtcgaatataagcggttgattttcataattgaacgcaaaccgcccgatataatatctgtcttctgtcttccgggactcttccctgaaatcaatgcgggcaaaataaggggattcttttatctttacaatccggtcgcggcgctccaccgcaaaggcaccgcttcggtccgtctgcttcagaagcatctcattttgaaacatctcatgaggatcaatatcccccggtgttccaccatataccgtttcgtgtccatatattcccgttctgatttcctgacggattcctccgctttctccagagcctccttaagcttcatgttaatttcttccagatgcagaagctcgtcgggaaacgggactgtcataccgtcactcatgaagcctttcctcctgtcccatcacaaaccgttgggtcgggtagccgtattcgaccagtaattccgcttcagcaaatccaagctccttaatctcgtcacggtacccggtatctgctttgtcaccttcccggtaggtggtaatactgacttttctgcctctcagaagctcacccattaccttgtcgagaagtgctttggggacccctctctttctgtaaagcgggtgactccccataaaatcaatgctgccgttttcataggagaacagcaggataccggcggcaagccctctgtcctttagaatcagcgcctgttttgtccttattttctgcttcaaaacccggatatattcctcctcgtccaggtacgggaatccgtctatcacaagcctcaccagctccatccagcacggaatttctgcctcggtggcaaatgtaattttccacccggcactttctgttctgtccagcatctcataactcctttcaaaatcaaacctaagctgcagcggataaaaccgttcgttttcccggtacatattcggcggcattttatacatggccgtgaatgcactcgtaaatgcctgctggctcctgtagcccgacagaagcgcaatatccacgattggcttttcagaaaagaccagcagctttgcagattctgtcagctgcctgcgtttcatgtactcatgaaccgtcaggccgaccgtatcggaaaacacccggtgcaggtggtatttggaataatggactgcgtccgcaatccggtccagattaagcctttcagtcagattagcttcaataaagtctatcgccagagacacctcctctatgcggtccatcattcaacacctccttttgccagattagtatatatgattatgggatgcgtgtcttaagaaatcttgctcttcttccatgaaacgataacctgcacgctccgcacacaggccccgccttcaatgaaaaactgcccctcattaatctataatgcggagcagccgtgtgatttctattcttatatattatttttcaatcttctcaaacttccttacgatggtcagcaaaagctccaccaccttctccatagactgaaccggaataaactcgaatttgccatggaaattgtaacctcctgtgcagaggttgggacacggaaggcccatataggacagtctggctccgtcggtgcctccgcggattggtgatacttcgggagtgatccccacttcctccatcgcctctttcgcgatatcaatcaggtacttatagggttcaatcttttccttcatattgtaataggagtcttttatcttcagctcaacagttccctcaccgtatttcttattcaggaactctgcggcagaagcaaacagctccttcttctgcgtaaatttatccatatcatggtcacggatcagataatccatcttggcatactccacgtctccggcaaactgatccagatggaaaaatccctcataaccgtccgtatacatcggattctcaaaagcgggaagaagactttggaattccattccaatcaaaagtgcgcttttcatcttgttctttgccccgcccggatgtattccaacgccatgaatgtagacttttccggatgccgcattgaaattctcatattccagctctcccagaggaccgccgtccaccgtataagccacatccgctccgaacccttccacatcaaagaaatcagctcctctgccaacctcctcatcaggggtaaagccaattcggattgtaccgtggggaatctccggatgcgccagaagccaggccgccatcgtcataatctcggcaactcctgccttatcatcgcctcccagcagagtcgtaccgtccgtcacaattaaatcccggccctcacagtcggccatgaacggaaaatcctttaccgtcatcacaatgttcttctcttcattcagaacaatatctcctccggcatatttctccacgattctggctttcacatcccggccggacatggcgggtgccgtatccatatgggctacaaagcccagggaggggacattcttttcagtgttggcttcgattgtggcatagacatagccatgctcactcaggcgtacatccgatgcacccatctcctccagttccttaaccagttcctttgccagaacaagctgtttttccgtgctggggacctgttcctcctcgtcttttgactgcgtgtcaaaagagacatacttcagaaaacgttctgctactttgctcatatcttcacctcgttattatttaaaaaaattccacacatacatactttaccataaattttgattttctgcgagtcccggcataatattttagttaagcaggtgaggacgccgccgcaggccagcggacggggtggtgaggtgtgtatatgagtctttcgtcccggggaaaccctgacaggggaagtaggcggaatcaattgcggaggggacatgggagtccgccggtgcttggcgaggtccctcacgagcttagcaccgatgcgcactccaaagagtgcaaacggtccccgcagcaattcattccggccggattccccttcacgaccaacctcccacggagacggaagactcagtcagccccctcaccacaccggacatggtccgttccggacgcaccctccaaacctcagttaaatctctattttaatcgtccctcagctccaggtctctctgaagcggctccagatagtggacataaatgtcgcggaagcttctgattttccacgatttatccagttcctcatatgtaaagcttttccttccgcccttctgcatcctggaccagaacgcgtcaagttcggtgaagggaatataatacatctcatcttttgacgtaaaataaaggatgataaaggccacgccgccctgcgcctcaaattctctcataaactccacctgatgggcatggacgttctggagcggaaatgtggaaaccgcacattccttggcgtcaaaacagacgggtacgccctgaacggcgccaatgtaatccacggtgcttttctggtcaaaataagccatcgtaatatggcggctctctttttcaatactcaccggcgtgattggcgtcggtatcttttgaatcagagccagccctttttcacggtagccgtcgtttgtatgattgattagatcctccagcgtggaaccgcggaggcctctggtattccaggttcccattcttcactctgctcctgctgtttattgttgcttctgttatcttaagagatgaagcgctcatatccgggcatccctgcggccatccgcataaattcttccggtggctttgccgtaaattcccggcctccgagacccgccagcggctccctcagctcttttggcatcacaagccgccatgcatgcagcatctgggattggactgcgtacttatccctcgcttcacggttgacagccggatcgccatacttgtaatcaccggctatcggatggccgatagaggccagatgcgcccttatctggtgggaacgtccggtaatcagttttacttccaaaagcgtatggcggccgtcgctgcagagcggccggtactgtgtgcggatgggaagtgcgtctttatcctccctgcaaagttcattcgctttcaataccgttacctgattcgtcttctcattttttttcagatacccgtcaatttcctttggcccggcaacgcttccctttacgatacagagataatatttccctatcgtcctctctttgatcgcttccgacatcagctgaaggccaggcagtgatttcccggctatgactataccgcttgtattgcggtcgaggcggttgcagacagagggcttaaactgcctcatatcctcctttgtaagcttaccgccgtccagtaggtattgaatcagatactccaccagggattcatccgtctcctttgctttctgtgaaagcatcccggcaggtttattaatcagaatgatatcgtcatcttcgtaaaccacatccagctttctttttcttaccttctggattttcacttcggaaaatttctctattgtctcatccgagaggaacagtttcacctcatcccctccgaaagcttctccgaaccgtcgcatttttttccgttgagtgtgatatttttcttcctcagcatcttataaataaaacttttccccgccagatttaaatactttgccagcagcttgtccagcctctgtccggcttcgtttttcgttatttttacaacctgcatcgctcctgcttcctcactgccttgtcattttcctacatacacaggcttttcatcgtgtttaccgcatattccacactgccgtcatcctcatattccgataccggtttcaggcttttaagccttttatcaaaggtgctcagttctccggtaatcttcatgttcggatccagtctctgggaaaccagtatctcatttaaggatttttcagcctcatggatatttactttcggattaatgcagtatgcgtagataccggtcggatggacggcaaccgcatccatcggaagtacataatccttcgtcgtcagcaccatgtcaaaaagcatggggaatttctcttcgtaaacagaatatttctcataaaactcttttgacggagttttgtatttgatgatggcgaccagaggagaagccagatttgccgccggaagtaccgtaacaatcgccataacggtcaggatgttctttaccgcctggctgtccgtaaagtagcgcgccgccagctgtgcaatgataaacaccgccagaactgaaattaaaaaaatgtgttttttcttaaagctggtacggtagccgtactcacctttccttatcttcttcaatttgtcttcctttcctcccgtaacagttcagacttttacggagttttatcgataactgcattaaccgggctttccacctgcttccctgaaatgcgggacatgattttcagtatcacgccgtgcggcactgttttacatagcagtcggaatgatttcataagaaatccatacacagatacaggttttcccatcaggctgtcccggatggcaagcttgaccactttcaccggatccgccattgtaagacgcttataaagcggaatacgccccgtagtttcagcgatgtcaaaaaactcggtcttaaccggaccggggcagacggccgtaacgcagattccccggcctttcaattcttcccccagcgccaggctgtagcttaaaacaaaggattttgtcgccgcatagatggcaaagcccggctgcggaaggaaagaggccgaagatgcatactgtataattctgctgtttttgctcatatagggaagcaccatatgggtgacggcacatagcgcctcacagtttaagcgcaccatccccgtctcctcctccgtcgaaacgctgccgacccgccccatctttccatatcccgaggcattcaccagtatcttcacatcaggctgttcattttgaagggccgtctcaagctctgcgagctgttctctgtccgtgagatcaatcgcaaattttctgaccggcacgggtagaatctcttcgagctgtgaaagcctctcctcccttctggccaccagccagatttcaccaaaaccggcaaagcggtccgccagctgtactgccgtctcccggcccatgccggaagatgcgcctgtcactattgcaattttcattccatatcaccttcctgcttttttatgcacattcctgatggtttttttcctggccggcttatcggctgattttccggcatgccctctgcctgctctgccgtcagcttttctctccggtttcccatcggcccttttcttattgtaattctggtagccgtactgcccggtctgtctcggccggatcaggcattttttatcaaaaccaataagatcggttctgcccgccgctttcagggcctcggcaaccagctcataatttttcggatttctgtactgtattaatgctctctgcatcgccttctcgtgcggatttgtcggtacataaaccttttccatggtccgcggatcataaccggtatagtacatacaggtcgaaagcgtggacggcgtgggatagaaatcctgcacctgctccggcatataaccgagatccctcaggtattcggccagctccacggcttctgtcagggtagagccggggtgggaggacatcagatacggaacgaggtactgtttcttccccagcttctcattcatcttctcatattccttcataaaccggcggtaaacgctgttttccggttttcccatcctcttcagtacattatcggaaatatgctccggagccactttaagctggccgctgacatggtactcgcaaagctcctttaaaaaagcatggccgggatctgcgagcagatagtcgaaacggataccggaacgtataaagaccttctttactttgggaatctcccgcagctttttaagcagggaaatataatcgctgtgatcggcatttaagtttctgcacggtttcgggaaaagacactgcttttccggacacacccccgccttcatctgcttttcacaggaagggtggcggaagttagccgtgggaccgcccacatcgtgaatatatcctttgaaatcaggctctttcgttaacagctcggcctcattaacgatcgactcatggctccgcgtctggacaatcctgccctgatggaaggtaagggcgcaaaaactgcagccgccgaagcagccgcggttactgatcaggctgaactttacctccgttatggccggaatgccgcctgccgcctcataggacgggtgatagttccgcatataaggaagggcgtaaacatcatccatctcttcttcactcagtggcctggccgccggattctgcaccacataaagatgctctccgtacggctcaaccagccttctgcccgagaaggcgtccgtattacagtactgggtataaaagctctttgcatattccttcttgtccgccgtcagctccttataggatggcagcatcacttcatcgtaaaccgatgccagggactccgccctgtaaaccgtgccgtcaataaacgtgatatccctgatatcgatgccgctgttcagcgcatcggctatctccacaatggagcgctcccccatgccgtaggatagcagatccgcctgcgaatccagcagaatggaacgtttcatttttcccgaccagtaatcgtaatgggccagacgcctgagactggcctcaataccaccgataataatcggttttttcgaaatagagcggatcaggttgcagtagacaaccgtggcataatccggccttttccccatctctccgcccggcgtgtacgaatcctttgcccgtctcttttttgaaaccgaataatgattcaccatggaatccatgttcccggccgacaccaggtaccccagcctcggctctcccagaatccggacactgtccgcgttcttccagtccggctgggcaatgatgcccaccttatagccatgggattccaggatccggctgataatggcatgcccaaaggacggatgatccacgtaggcgtcccccgtaacatatacaaaatcgcattgctcccagttccgtttttccatatcttccctggaaatcggtaaataatcatgtatcattccatattctccaattatctgaccgacggtctgtcatgccggttcatcttctctctcatgagcagttcgtcgtaatcttttatgtaatagtccgccattgactgtttctcctctttcagatcgagtgaaaattcatcctcaaccgcacagacggtcattccggcccgttttccagccagtatacccgccggtatatcctcgaacacgagacactgctgcggtgccacctgaagcgtatccgaaaccttcagataaatatcgggagacggctttcccgatgccacctcacaggccgttgtcacaacatcaaaatacggttccacccggagggagccaagcacggcgtccaccatatcacggccgttgctggtggcaatcccaagcttgaagccacggcctttcagctcgtttaaaaaggctttagcccctgttttcagcggcacctcatgacggtatttatcaatcgacatccggatccagatatcttttatttcattcagctccatcgggagtgaaaagcgttccttaaaataagcggctgtctcggaaaagctcatcccttcgattgccctctgtaagtcatccgggcagccatagccgtaccgcccaagaaattcgatgtcgatagccttccacatccacatggaatccaccagcgtcccgtctaaatcaaatattgccgctttctttccttctaacatatattgcagactcctttatccgtaaatttcgtaaccgttcagacagcatgaacggttacatgagttccctttgtgggaataaattttcatacacgccccagcgccttaatctctttcccggtcagaagacggctctcacccggtttcagcttcggatccagtgtcagggggcccatggaaagacgttttaaaaagacaacctgacctccggctgcctcaaacatccttttaacctggtggaatttcccctcatgaattgtgagccttgcctcacagaccggttcgccggcttcttcataagaagattctatcagaagttctgccggaagtacagtggtttggtctgccagcgttatcccgcccgcaaacgcctgcacaatatcctctctcagtgttcccttaaccttcgcaaagtaaaccttgtccacatgctttttcggagaaagcagttcatgggccagcttcccgtcgttcgtaatgagaagaagtccctccgtatcaatatccagcctgcctacgggaaacagatcctttcgctttgcatctccaatcagggagatcacagtcggatgcaggttgtcctccgtcgccgaaaccacgccctgcggcttattcagcatgaaatattccatcctggcataggaaaccggctctccgtccatgcagacgccggaaacctccggatcgaatttgaaatcggagctgcggcagactgaaccgtccacggtgacccgtcctttccgaaccgcctcctttacctggcttctggttcccttcttcatctcggccagaaacttgtcaagccttatcattcccgccatcactgccacctccatccgggataatatttgttcttcaagataccgttctgacgtcttgcaaaccccagcggatgaccgtccgcgcagacaagacaccatcccctgctctgcgttgtctcctcctcggaaagctgaaccgtctctcctttcagatagcgtattacgcgtccgtcctccgaactcatgtcaaacgtgtcggtaaattcttctttcttcaaatacatggcaagagcctgagacggctcaaacctgcccttcttaagttcccccagcagaaggcctgtcctgagatatctcactttcttaagataaggcgctccggcaccagagagaggctccggcaggtaatatattgtctcattgacatgatacagacggccgggctcccattccctgtgtgtcagggccagaaactcacggaccggctcccattcctttgtccacttagccggggcggccaaaggcaccggcgctttcctgcttctgcctccgtcctcttccgaaccgcaactgcgtccatcctttttaatgagcgctataaaatgtccctctccctttattttatggggaaagagcctgacgcactcggaaagtccgattccgggctgaaagccatcctgtttttccagtggcaccagatgcaaatcatcatgctctttaagcagacgccggatcgtaccctcgttctcttcctcatcaaacgtacacgttgaatagagcatcataccgccgggccgcagcattttgacggcttccgaaacgatttcgtactggatacggctgtaatactccgggcctttttggctgtagcttttcaccatatcgccgtcgcgccggaacatcccttctccggaacagggagcatcgaccaggattttatcgaagaatccttcaaaatatcgggccagtttttcaggcgtctcactcgagacacagatattgcctgccccggcaagctccagattctttaacagcgcttttgccctggaattgctgatgtcattggaaaaaagcagtccctcgccctggagctttgccgccagttcggtgctctttccccccggtgcggcgcagaggtccagaaccttgtctcccggctccaccggaagaagtgatgcgggagccatggcgcttggctcctgcaggtaataaagccctgcaaaataccacggatgtctggccggctttaaatcccgatcataataaaatccatcaccggcccagggaatttgtgtcagtttccagccgcattccgccgcaaattgctccggcatgcatttgagccggtttacccggaggccgtaatggggcggttccgaaaaacaggtcagataatcctcaaactcttctttcagcagctttttcatcttttctaaataatcgctcggcagttctctgtagtccaatgtgtaaactccttttatccgtcattgtccggcagccgtcggcatcgtaactaacctcaaaataacaatctgccaaagctgcttcagtgtaacagttcatgcctgtctgaactgttacgcttagtaattatattttaatttatatttttcaagatatttcaaaatccaatagggattaacactcagttcctcataatgatccgtacggatatagatgccaagatgcagatgtacggcaaaattgccaaccgtgttctcctgtttgccatagccggaatcccccatataaccgagaaggctgccggcctttaccttatctccctgtttcagatccggggcatacgaatacaggtgtgcataatagaggtaggctccggactctgtcctgataccgattctccatccgccctgttccagccagccaatcttttccaccgtaccgtcgctgatgctgattaccggatagaaaccgcgctcccgctccgtgcccattatatcgcagccctcatgcccccgttctccgccgtaggtgcgcttctgcttccagctgtcttcatatacgggaaacggagtgccggctctcgtgctctccggcacaggaaaatacttcaagtcttttaaaatcacttcatacgctccggacagtttcttataagccgccggtttttggatcagagccatgctgttatgatacgtcagatccctgcagtctgtcaaatcaaattcatgctccagcatcagagatgtaatctggtcataatccacataatcctggccggcgacagccgcccccagcttcatgctgcgaaagtcgtcgctctcccatgtataggcgttcaactggtaaaatccgggattctgcccaagccagtgaaacatggttgtgttaaaaacggatagtaaaagaaggaatataatgaacataagagaatcgcttccggacatatattatataaaacattctattcggactcttatgaaaaaatccatcctgccggtaatcccggttttaatcctgattctgctgctgatgcgccccgcccttgcctttgacggggctaaatccgggcttcttctatggtttaacgtggttctccccacacttctgccgttcatgctctgctcaagccttctcgtggcctggggcggggttccccttatcacacggccatttgcaccgctgttcaggctcctgggcctctctgataagggaagctatgctctgatgtccggactgttatgcggttatcccatgggcgcaaaaacaactgccgattttgtccgtgacggcagcatatcaagcaacgagggaaaaagacttctggccatagccggctgtcccagccccatgttcgtcgccggttacatacattctcacctggacggtacggttcctttcctttttatcgcagcagccgtctatctcccggtcataatcaacggctttcttgtacagctcttttacagggaaagaaaaaaagctctcccctctcctttgccggtcacctgcaatgccgctcctgacggcaggccatttgatgaaatcatgatggcttccctagagattatggtcaaaatcggcggatatatcatgctgtattccattctggcaggctttatctgcgaatcctccatactcccggaatcagtaaagccgctgctgaccggatttgtggaaatgacgacggggattgatgctgtctcccggacaatgtccggattgcccgccgccctggcaatcctattctccgccgtcttcggcggcctgtccggcgtatcgcagacaaatacggttataaaaaatgccggactctccatccggcattatgtactgtggaaactgcttcacgcggccctctcctgtactatccttattctgctgtcatctctgtagccgcggcctctccgttgtcttccagctccgtcacaacgctgcctgccagctcgttgcggtttgaggatacgatatcatagctggactgcatggagttcataaagccgtcaaaacgtccctgcgctccttccatggagtgtttgataatggtctggagactgcgcagcatatcgtccgtatactgcacggaactctggcggatattgttggcttcaatcacagcgctgtccacaatggcctgtgcctgtgcgttagcctgctcaataatgctgttggcctcggagtatgccctctgcataatctcatgctcattcaccagctcgttcgtctgcgccgttgcctcggccaccatggcatcggcctgggaacgggcttcctgaagaatggcatcctgattgcttataatcttctgatacttcttaatctcttccggtatccttaatcgaagctctacaagcaactcctcaatctcttctttattaacaagaatctttgcattggacagcggctgatacttacaactgtcgatataatcttcaatctctgtaatgatctgttcaattctgctcatagtctttctccttacttattcgctcctctgcccagcctgggccgcatacttttctctcaccttttcagcaatctccggcgacaggaaagaggaaatatccccgccgtacatggcgacttccttcgccatgctggaacttaaatatgcatatttaaggttggttgtcaggaacagtgtgtctatctcgggtgcaatgaccctgttcatctgcgcaagctgcagttcatactcaaaatccgtgatagcgcgcagtcccctgacaatcacattcgcatcattgctgcgaacaaaatcaatcagaaggccggcaaaagactgtacctccacattgggaaaatgggaagttacgtcttttaacatattaacacgttcttcgacagaaaacaacggagattttgcactattatttaaaactccgacgatcagtttatcaaaaatttttgaagaacgctcaatgatatcgtaatggccgagcgtcaccgggtcaaagctgcccggataaatagctgtcttcatccttacttttctcctttggtaatgaataggtgcttgttggtcttgtactctttttcgcgtacaagctcaaagccaagctcagaaagataatccatcccggtctccctggacgcctccgcgataataagagtatctgcgtgggtaagggctgaatgggccagatattcaagtacagccttttcgagcaattggttataaggcggatccataaaaattatatcaaacacaagctgtctttcctcaaggcgtttcagcgccgtaatcacgtcgcagttcattaccgtcgccttgtcttccagatgggtgattttcagattctcccggatacactgggcagccctggggttatgttccaccattacggccatttcggctccgcggctcagcgcttcgataccgatggctccgctgccgctgaagagatctaaaaaagtgcagccataaacatcattctgcatcatgttaaaaagggtttctttaattctgtctgtggttggtcttgtatccttaccttctattgtctttaaaagcagcctcttggcgcttcctgctattacacgcatggattctttccccgaaaatttttttcttatatattatagtatgtatttcatttatatacaagcagtatttctgaataagctcacttttattgtaatttatcctcacagtggagatttgcatagcaccgctgcgcactccaatgagtgcaaacggtccccgcagcaattaattccgtccggattcccccttacggcaacctgcaatccggggacggaagactcagaaatacctcaccacaccggccccggtccgttttggccgcgtcctccattctcaatatataacgcaaaaatacagggcaatggcagcattctatctgccgcagccctgtatcttcgccgaaaaattcaagatttctcgaaattataagtcagttgacttatttacctgccatctgtctttcctgagcttcgatcatctttttaaccatatatccgcctacagaaccattctgtgcagatgttaagttaccattgtatccgtttgttaacggcacaccaagttcgttggcaacctccattttgaatctgttcatagcttcctttgcttctggtacgtttgtgttgttgttgtttgtagtagacataataaacgcctccttttcatctgttttttagtgcccatgttattgtttgtgtgtttgtttcatgggctgttatttatgctacactcctattatggctctcagatgaaataatactctgatatcttttggtacaaatggaatttccttcctgacctatcagtccgcattcatttatgctttacaacagatgtttatttttctttcaatgaaagaaatgcacaaaggttaccgcgccgttcagccgttcttctgtgggaaaacaaaagctggggattacaatatgtgcagatattggtcaccgccagattatcgcctttgattcccgcttcttttaaaacaatctcattagccttccacaagtcaagctgatattttccgttttgtttttttaataatatcacatcatgatatttttcgtgaaaagcatcggcaaactcatctgccacttcttctcctacttcataacaatccccacagatactcggtccgatacaggcaatgatatcctccggccgcgtgccgaatgcttccttcatcgcatcaaccgttccctgccccattctttttaccgtaccgcgccagccggaatgagacaggccgattgctttatgtaccggatctaaaaaatatagcggaacacagtcggcaaaaaatgtaaccagcgttataccgggaatatcggtaatcaggccgtccacatccctgtagtctctgtctctgacaatccccttcccctcgtcctcttctgtcacccgcctgacattagttgtgtgagtctgccatgtcagtaccatgcgttctctgtccacgcccagagccgccgccattcttctgtaattttccagcacatcatccctgtcgtcaccccttgtgaaagagaaattcattgtggcgaaatcacccttgctcacaccgccaagacgggtggaaaaagcatgggaaaccagccctgtatcttcaaggatgggaaatgataaataagtaactcccctgttctcttttacggtcagtaccgtttcttctgtctttttaataattttctgcgtcatagtttcctcccggcagaataaccggctacagccagaatgcatcctgaatcagacgcacctcatcctccagaaccgccactacatcaaaacggcagggagtttcctccccatatccgcgggtcagcaggtaatatctggccgcgcctgcaattctgctttttttctttgcgtcgacggcttccgccggatctccgctccctttgctgctcctgaatttaacctcgacaaatacaagatagccgccgtcttttgcaatcaaatcgatctctcctgtacggcagcggtaatttttttccaggattacatatccccggtctgtcaggaaagcagccgcctgtaattcatgacggctgcctgtctccctgttattctttttatttttactgcgtctcattcttcaaatccatctttgtcagaaagcttctgcggtggatcggacacacgccgaattcccgtattgcatccatatgagctttcgttccatatcctttatgtttagcaaaaccatattcaggatagagcttatcatactcttccatcatatgatcccttgttactttggcaagaacgctggctgcggcaatggacacactcttggcatctcccttgataatcctgacctgctttttatcgtcaatgcccggaatcataacggcatcatttaaaaatatgtccggctcggccggcagctgcgaaacagcctgccgcattgcctcgtaggtagcctgaagaatattaatctcatcaatcactgccgggcttacaattccgacgccataggccaccgctttttcccggatttccagaaacagctcctcacgccgcctctccgaaagcttttttgaatcattcagccagagaattacagcatcctttggcagaacggcagccgccgcgacgacgggacctgcaagcggtccccttcctgcctcgtcaattccgcagataacggaatactcttcgtatttacgttcatattctctcatctgctccaggcgtttaagctcctgttccagtttctcactgctgatttttctcatcttttgtatgtctcccgtcttatacgtatacttaattctgttttcccgctcttccctcttatttttctccgggggcttccgggaattccaacgtgatccggcccagctttccgcttcggaaatcatccagcagcagattggccgcttttttcgtatccagctcgtttcccttaagcaggcaggaacgggcctgcgctacctccctgagcgcctcataggggtcctttgtctctataccgtaacgctcatttaagtttcgtccgtaatgctttatcaggaatttcagcagttctgccgccagttcctctttgtcgataatttcatcattgatggaaccgataaaagcgagcttaagccccacttcctgatcctcaaaacggggccagaggattcccggcgtgtctagcagctcaagagtcttgttgaggcgaatccactgatttccttttgtcacacccggtttattacctgtttttgtacatgctttgccggcaaaggaattaatgaaggtggattttcccacattgggaattccgacgaccatggtgcgcacaggccggtttaatattcccctcttcctgtcacgctctatcttttcccggcaggcttcctgtaccagcggctgaatctgcttcagtcccatgccggatcttgcattaactttaattacatggaagcctttctcctgaaaccaggccgtccacttctcattatatctctcatctgccaaatccgatttatttaaaaggataatcctgcccttattttttgccagctcgtcaatatcaggattccggctgcctaaaggcactctggcatccaccagttcaattaccagatcaatcagcttaatatcttctttcatggctcttttggcctttgtcatatggcctggataccattgtatattcatttcaatctcctttcacgtgaccgggcgtatcagcccgaaatggcgtaagggacggattctgagccagaccttacctttaatctggccttttttcacatttcccacactggcaaaacggctgtcctcgctgttctctctgttatctcccaggagaaagtactcatcctgtgaaagaagcaccggattctccgcaaggcctgccagggcggcctgtcccagtccgttttccgcatctattcttttatcgtcaatatacaggaaaccatccttaatctgcaccgtttcgcctggcagtcctacgactctcctgatattaaacttattttcttccttttcaaacacaacaatatcgaaccgttttattttaccaaatctgacggaaagacggttcatcaaaacaacctcatcctgtgaaagaacaggatccatcgattggcccgtcattgtaatctgtgtccccagcgagaagacaatgaaccaggcaacggatatcacgacaactatatcgacaatccagtttacaatcagcctcaaacggctggtttcttcgtctatatacattcgcaccctttcactctgcctgccaaaaaactttgtctgctaaaaaagggacaatatacattgtcccttttctttcaagaattatttaactaactctttaactttggcagctttaccaactctgtctcttaaatagttcagttttgctcttcttactttacctcttctgataacttcaatgttctcaacaacaggagaatgtaacggccatgtcttctctacgcctacaccgttggaattctttcttacagtgaaggtttctcttaaaccgccgttctgtcttttaataacagttccctcgaaaacctgaattctttcacggtttccctctttgatttttgcagatactcttacagtatctcctacattgaagctcggaacagtctcttttaactgagcagcttcgatattcttgataatttcgttcatcctggtgaacctccttcaaaatctttgatgttcttaatacgcttcgtaacagaggaccatctctttatttcacagtttattatgataccatatatttcaaaagaatgcaagcattttaattaagcaggtggcaacgctgttacacggaacgaactgccattgttccttcttgctatttaatcaaaaacttcttttactacaaattttatttcatcattttcttttgtaaaactaacttcgcatgtatatagggtcccctctaccgtcagtaatttgaatgaaacaactccatttcctatatacgtaaactctggctcaggtgcaagttcagcagaaatacccagcttttgaaaatccccctcattgtcgataaatgccacttcagcagctcccgtatctctgtctttcaacaaaacggcgccaattcgctcatatgcattatcggaaacaacttcgtaatccacaatttctaagtgtttatcctgattaaaccggtcagaaaatttactctttatttcttcttccgtccatactttattttcattactttcagaaaaatcaacttccatatcctgtccgttaatttcggtggtactgatagtatctgccatttttttcgtacaaccggaaagtgaaaatgtcagaacaagtatacacagcgtttcacataatctatattttgtttgtttctgcatcattttcattcccctgtaaatttcaattttccgctctctgctttttccagccgcgtagtggccgtaaaatatttcctcaccttcaattcattaaactcttcagatactccgcctcttccttggacagcgccgcatcctcaagaagctccggccggcgctccagtgtccgttcgatggacttcctacgccgccatgtttctatatttttgtgatgccccgacagaagcacctccggaaccttctttcccatgaattcttccggtctcgtatactgggggtattccaggaggttatcgtggaaggactcaaattccgccgatacgtcgttattcagcacgcccggcaccagccttgagatacagtctatcattaccatagccggcagttcgcctccggtgagcacatagtcgccgatggagagataatccgtcacgacaagttccagtacacgttcatcaattccctcgtaatggccacagagaaacacaagctcttcctccgaagccagttcttctgcgattttctggttaaagaccctgccctgaggagtcaggtagatgactctcggcttctttccaatctttcgttcaagatcctcgcaggccgcataaacaggccccggctgcatcaccatgccggctccgccgccgtaaggataatcgtcgacatgccggtgcttgtcggtggaataatcccggatattgacggcctccaccgatatcaggcccttctccatggcacgcccggtaatgcttgtgttcaggccgcccgttaccatctcgggaaataaagtaagaatgtgaaaattcataaataatatactccttacaggtccagaaggccgtccaggatatggaccgtaaccttcccctcctccagatttacatccagaatgcactccttaattgatgggaacagatattcctttccatcgtttccgtctatcacatagacatcgttcgctccggtctggaggatatcctttaccgttccaaagtctttcccctcatccgtcaccaccttaaggccgatcaaatctatgatgaaattctcatccggagcgagactgaccgcatgctcccttgaaataagaagatcttttcctttatacatttcaatatcattaatattatcatagcccttaaatttgactatcaccatatttttgtggaacttaacctgctcaagctccatcaggattcttccctttcccgtatcgagaaagacttcctttaaatccttatatcggttcacatcatctgttgtgggaaataccttgacttcccccttgattccatgggtggaggagataacacccaccctgagaaactgttccatcctatttcctgtcctttcactgcctctggaagccgctgcacgcggcatcttttgccggccggcgataacctggacgctccgcgcaccggtcgccgccgtcaattaagaaaagccgtcttcccctgcaggccggcggcttttacgttactgaatctctacaataacttttttatcatctttggaagctgctgctttgacaacggaacggattgccttagcaatgcgtccctgcttgccgattacctttcccatgtcggaagcggcaaccttaagctcaactacaatctcgtcatcctttaccgattccgtaactgcaacttcgtctgggttttcaaccagtgcttttgcgataacttctactaattctttcataccaattcacctcacaggacattactggattccggcgatttttaaaagtttaccaacagtttcggttggctgagcacctgtagataaccacttcttagctgcttcctcatcgatcttgattgtgcttggctctgtgttaggatcatagtaaccaatttcctcgatgaatcttccatctcttggagatctggaatctgcaacaacaattctatagaaaggagccttcttctgacccattcttttcagtctcatctttaccatttttctttcacctccttaggttaatgctgtatagacaatgcgtttcgcatcatactaactttaatcagaacggaaatttcatcttaccgaacattccgcccaggccgcctccgcggcgtttgcctccccccatcattccgggaagctgcttcatcatcttcttcatctcaccgaactgctttaccatccggtttacctcggcaatgtcaacgcctgcgccgttcgcaatccgtttttttctggaaggattgatgagatccgggttccttctctcctcatccgtcatggagaggataatcgcctcgactctgtccatcgccttctcattgccgtccagatccacgcccttaagctggttcataccaggcatcatcgtcagaatgctggacatgccgcccatctgcttaatctggcgcatctgatccagaaaatcattatagtcaaactcggcctttttaatctttttgctgagttcttttgctttttcttcatccatcacggctgcggccttatcaataattgataatacatcgcccataccgagaatcctggatgccatcctgtcaggatagaactgctctaaatcggaaagcttctctcccataccgacgtagataatcggcttgcctgtcactgctttaatggaaagtgccgcaccgcctctcgtatctccgtccatcttggtcagaatcacgccgtcaatgccaatcttgtcgttaaacattccggctacattgaccgcatcctggccggtcatggcgtccactacgagaagtgtctggtatacgtccacgttctccttaatctcaaccagctcgttcatcatatcctcgtcgatatgaagacgtcctgcggtatcgataatcaccacattgtggccattctttgaagcatgctctatggctgccttcgcaatattgaccggtttatggcccgtacccatggaaaaaaccgggactccctgcttctctccattcttctgcagctgttcaaccgccgcaggacggtacacgtcacaggccgccaaaagaggatttctgccctttgccttcagcttgcccgctatcttggccgtggtcgtcgtcttaccggcgccctgtagaccggccatcatgataaccgtgatctcattgctgggttttaaagcaatctccgtcatctcggaacccatcagtttcacgagttcgtcattgacaatctttattaccatctgtcccggatgcaggccgttcagcacatcggttccgaccgcctgttcctgtacagaattgataaactgttttactactttaaagctgacatccgcttcgaggagagccatcttcacttccttaagtcccgccttgacgtctgcttccgataagcgtccttttcccgtcaggtttttaaatacattctgcagtttgtctgccaagctctcaaaagccatttaaaccctccgttaaagtagatttacaccagtttcagaatatcgttggagatacgtccaatctgctcaataaccgccttgtcctccgtctcaaggaattcacaggtgagggtgttaatctcctccaccagttccctggtcttaaggaacttcccgacgagtcccagcttctcttcgtatccgttcagtatcctgtcgcaccttttaatcatatcatggacaccctgcctgctgatgcctttttctttcgcaatctcgctcagggacaaatcgttgaacacgacatcttcataaattgccttctggtgctctgtcagcaattcaccgtaaaaatcatataaaagaccctgctctacaattttttccatttcaatcacctgacttatcatacaacaggttttatagggtgtcaagtgttttttctttacaccctatatttaaaatgatatattttccttttcagctaaatctcatcctcaactgctcttttcgtacagataaaacggttctttccctctctctttgccagatacatcgcatgatcggcgtttcggtaaagctcctggtaactctgcccgtcgtccgggcaggcagcaataccgatgctgacggacatctccatctcaccctcaccctgtgagtgcttcagtttagacaggatcagctccgcctttttttgggcattttcaatatcggaggtgtccgacatgaaagcggcaaattcatctcctccgattctggccaccggatcataatcacggaaggactggcgaagcagctccccgattctggtcagacagccgtcccccgcctcatggcccttcgtatcattgaccatcttgaagttatctacgtcgatcatgaaaaagaatcctttatttttttcttcaatcaaagtatcaactcttccaacgaacgcctcccggttcataaggcccgttaatgcgtcggtgcagctaagggaaagaagattcatctcctttgccttacgccctgagatgtcgataaccttgccgattacaatatccttgttgccgttaattggctgcatcttgcattcgcaccagatccagcctccgtcccgccccaaaagccgcatttctacgacattgcgcctgcagtccctgcggaccgccgcaatggcctccaaagcgtcccccgcatcatccggatgtatcagcccgccgctgaagttacggaaatttccgatactggatctcgcaatgcccagtaaattcgttgcattctgagtcagctgcagtacatcggttttataattatactcgaaaagaatcgtatcggaaaaatttgacagagccgcataccgctcctgctccagcttaatccggcgcccgctttccaatatgaggatatatacaaacaacccggccagaaatgtaagtcccaccagagacattcccattactatcgtatcatccagaagctcggcagacacatttttcatcatattaccatttgaaaagctcatcaggttccatccctttagccccataggaatatttgtcagaaaagcgctgtccggcctgacttcgaccgtcagtgttatgctcgtattgtttttcacagcctcgataaagctttctatcccgtccgtattttcctgtgcattacttaaaatgtcacatatattccgtcctatccactgatcctcatcggtgcaatagagaatcttcccttttgcatcagcgatacagctgaccatatcccccctcatggccgaatatcgttccagctgcttcatcagcttttccgctttgacggcacatcggatcacgccaatcgtctcaccttgtctcaccacaggttctccgagataaaaatagtatccgcctctgacctcggaataaacaagctccgatacggcggaattccccgccagaagctgctcgcagaactcacgttcctccggctttaaatcggcttcctctgctcttttctcccacttccatgccggaatataactgaccggaaaatcattgtccccatttaccgtggacagatactgattaaattcttcactctccgggtcaaactccgatgccgcggcaaacttggcaaccgattttatgcgccaggtcatatctgctagatcttcgctgatttttatactctgcgcttccccatactcattcagtgtttctttctctatctgtataaagcgctcattgattttcgcaccgtaattaataaaaatagaataaatcaggacgcaaaaagcggtgacggcaaacatataaaacgcagttttatatctgccgtatttcactttctcctccatgtaactcctcctcctttacaaaacttctgtactcgtcttctgataaaggcggggacactaaaaaaccctgcagataatcgcagccgactttctgcagtaaatgcagctgttcctcattttcaactccctccacgattgtcagcatatccaactgcttcgccatctgcagaacgcttttgacaacaatctgcctgcgtctgtcttccccttcgcaggcaagaaatcctttgtccagctttaagatatcaagcggcagtatctgaagcacgttcagggacgaataccccgttccgaaatcatccatcgcacagataaacccggcttttttcagctgcttcagaaccttctgcatcagttccagctcttctactgcgatactctccgtaaattccagctccagttcgtcgtcctctatccggtacctcttcttaatttccagatacgtctccacaaaatccggctgcatcattgtgtgcctcgacacatttaccgcaatacatacggatgtgagcccgcatgctttaaaccggttaatcaaaatgcatattctttcataaatataaagatccagctctgcaatcatgccgtttttttcaaacaggccgataaaatcatccggcatggcatagattcttccgttcctcatccatctgaccagggcttccgctcgatgcgccttctgaccgctcacatccgtgagctttatctgcggctgaaaataaaggacaaattcctccttatcaagagcggacctcatctcagcctccatctctatcccggccagcgcttttttcctgagttcttccgtaaaaaacaaaatcctgctgcctcgcggactgacgatggatttccgcgccatattggcccggttcagcatctcatctatatccataccgcaggggttttcaggaatgtagacaccgcttatcagctccacctgataatttttttcttcgaatggaccgaacgaagccagtctgtccgcaagtccgttaaaacgatccctgagtctgtcctgttcatcgagcctccacaaaaatgcaaaattatcgtcactgattcggcagaatgcctcgtcctccctgcagctgtccttcaggcaggacgcccagtattttaatatcaggtttcctgtatggaacccgaataaatcgtttatgtatttaaaatttttaatatcacagtaccagagtgagtattcctgtggcgccgactcggaaaaaagcctgccgctctctctcctgaagccctccagattcagactgcccgtaagcgcatcgtaatattgcaggcgcatctttttgcggtaaagctcctctctctgcatcagggaggagagatagaaagccagggtaaagagcagcgtgatatttgcctggttcttgctgaaatttccaagcgtaatcattcccgccagttcactgcccgtaaataccggtgtgctgcaaagagatgtgactccttcctgcttcagaaattcatagttttcaggatcggaatccttcattgcttccgtatctgtaatcagaatctgcgtataactgttgaaaagctccccgtattccctgacaaaagccgacggaatcctgccgggcctccatttaccggattcccgcctcccccattgtgtcaatatctgatgttccccaaacctctgaaccgttccccactcagcgccaaaaaaaggacagatattatcaaggatccgtctctgtgttacatacaagtctgtttcatgaagcataggctgaatacaattcatcagcatgttttgtccttcaagactctccgaaagagctttaagcaccgcctcatggctttttagggcagttgctatctccatccggacaatatggccgtcaaaatccaccagcttatcttttaatatgtaatccgtatttaaatgagaattatggtatgtccagatataataatgctccctggaaagaagatgattggtgcagaacgggcagggttccaaacgcccctgaaggatttcatagcacttctccccccggtactgctctcttctcagttcttcagaaataaacgtttcatcactgatatacaaaatctcatacgtttccggatcactgaaatatacaaatgattccggcttctccatcatcaggatttcattaatagtccgctgataccgtttcatgatatcaaaccctcttttcagtctatatccagattgctctctcacagtcttccttccttctcttgcgtacgtttagataatcttagcatcaaacgattttattgtctaccgttccgacaataatagaagagcctccttccgatttttgtataatttgtataattcgacacggaaggcagttttttatgcatttccggtcatcttttgtccccggcgaaaaataagcgccatacgcttcagcacgctgaacgcaatctgcgatgccctggactgccagccaggagacattatggagtttgcgcgcgatggagatgacggtataatctattaacgctgcctgcacgctccgagcataggtccaccgcccttaatacaatatggccgggagacatttcaataactgtctcccggccattaatcagactataaccccatcttttttaggaatctttttatatattttgcgataacaaatcatgtgagcggccgccgtaatgagccacgaaatcggatacgatatatataatgaaaaaagcgtatggtggtaagcaaaaatggtaaaaatccatatcacacgcagtccgcaggctccggtcagggataccaccatgggaaggacggaatatcccatccccctgagactgcccaccagcgtatccatccagccgcagataaaataagtcgtgcagataatggacatccggagcattccataagaaatcacttccggatccgaagaataaattttcagaagatccgttccccctatcacagccaaaaagccaagggccattcccaccgccgtcaccgtgccaaggcagataaacaggatccggtttacgcgtgtgtacatgcgggcgccgatattctggcttgtgaagcttaagttcgtctgataaagggcgttcatcgccgtatatacaaaaccttctatattggcagaagccgtattgccggccatggctatggaaccgaaggagttgacggacgactggatcaggacgttggatatggagaaaatcgccccctgcattccggccggaagacctatcttcattataagcagcgttttcctcttatctatcctgagtttttttaaatgcagcttcagaggtccgtccgactgagccagacatttaagcacgaggcctgccgatacgcactgggataagacggtggccagggcgacacctgccacgtccatgtgaagctgtatgacaaaaaacaggttcagtacaatattgacaacaccggccagggtaagaaaatataacggccgttttgtatctcccaccgccctcagaatggcgctgccaaagttataggccattaccacaggcattcctgcaaaataaatcctcatataaataacggatttttctataacgtcttccggtgtccccatcagctccagcatatatctggaggtaaaaaggccgaggaacacaagaatcgctccgctgaccagactgatggctattgccgtatgtaccgtctcactgacatccttctcgcttttcgccccgtaataccgggcaaccagaacattggccccgattgaaagtccgataaatatattaatcagaaggttgataagagccgtcgtggagccgaccgccgccagagactggcttcctgcaaaacgccccacgacaatcacatcggccgcattaaagagaagctgcagtacgcctgacagcatcagcggcaaggcaaatgacaacacctttttaagaatcgggccgctgcacatatccatttcataagacttcttcattctctgctttcctttcctgtaatcgcattataatacttcaaaaccggttttgaccggccaatgtcatattctactgctgcttcaggagtaatgcaagtagtttttacttaatttttacacattataattctttcatcatctggccggcattatcagcagccctgacttttgaaaatgcttttacaatcacacctttttcatcaatcagatacgttgtcctgactactcccatcacctttttgccatacatattcttttctttccatacatcataagcctcgatcgcggttctgtccggatcggcaagaattgtgaaaggaagattgtatttctccgcaaattttctatgggactccaccgtatccttgcttatcccgataatcaccgcatttttctcaatgaacgcgggatatagctctgcaaatgagcatgcctgatttgtgcagcctgccgtattatccttgctgtaaaaatataatatcactttctttcccctgtaatcagacagggaaacctcttttccttcctggttcttaagagtaaactccggtgctttcattcctggttccaacatgattgatacttcctttctcttatatattttcacactgttgtttttaacacactgatagtctgcgccaaatcggcgttttttaaatcgccatttcagtttttcaccgtttgatttcgccctctccaagcaaatcatatataatggaagcaaaaatgacggcgccttttttgagtactgtttcatccacatcgaaccgtaccgtatgctggggcgatgccatggcagtcatagtccgcatatagactgcctgtcctccctgctcctgaacccgtttcatcataaatccgatatcctcgcttccccagttctgaacattgggattgctgctcaccgtatactggggaagatgctcccttaccatgccggcaatccgctcaatgaacaaaatatcacttgtctgggaaggagcgtgtcccatcagctccatctcacaggtgcagccctccatcattgccgcggcccggcagatctcgattgccctctcttccatatatgcgttaacttccgttgtctcgccgcgcacctccatggatatcaccgcctcatccgccaccacgttgctgcttgtaccgccccggatactgccgacattgacccgggtgatcccgccgctgtgccgtgaaattccggccagccccaccactgcatgggccgccgctaaaacggcattcctgcccatttccggaaaacctccggcgtgggccgatttgcccctgaaatacacgtcatacttacaggtggcaagtgaaccatacgttcctggtgttatgtctccgtcatctgccgaattatccggagccacatgggttcctgcaaagtagtccactccgtccagatgacctgcttccaccatcgcatttgctccccgtacgccttcctcccccggctggaacagcagttttacggttccgtgaagctgtccccggacagaggccaggattctggctgtgccgagtccgatagccgcatggcagtcatggccgcaggcatgcatcattccatgattagcggatgcaaacccctccctggcaggcctgtgtttctccgatgtatcctcctccatcggaagggcatctatatcaaatctgagggctgcaaccggtccctctccgcagtccagaatcccgacaactccggtatagccctccgccatctcaccgttcagataatcgatatattcaggcattccgtcttcatttccgccatccattttccgttcgatcgtcgcctcggcttttactctcctgtaatgctcctccaatatatcattccctggcaccgacagcctgcttccttcccggcagactgcttttccggtcagaaccttataaccgagccgggtcagctcctccgcaataatggcggaggttctcatttccagccacgccgtttccgggtgtttgtggaaatctctcctgaattccaccagcttttcctgaatcgaatccccaatctgagtgatttgggcatacatatctcccttcggcttaagcgcctctttcggtgtatataaatctgcttccctatttgtttccatatattttttatctatctcctttaatgacgtattttcatttattagtctatcacattttatagtaaatggtaaaaattttgtcggttttctctgaattttgtgatatactgttaaaactaaaacaaatgaaaataccggaggttttttaaattgaatcaatctgctgcatccatccatttaccaactgatcccaacagtaattcaaagagccatgcggattctttgaacaaaaaaatcatgattatcggttccacctgcgtggatatcataataaatatcgaccacctgcctaaaactgaagaaaatatccatccaagcagccagtcgctggctttgggcggatgtgcctataatgtggcctccatggtcaaacaattcggtgttcctgtcacactgatatcccctgtcggaacgggcttctacggagaatttgtggcaaaagaactggagaaaaacggatttccggtcgccgtccatgtacccggccaggaaaacggatgctgctactgtctggtggaagccggaggagaaaggacatttatgtcttatcacggcgctgagtatacattccgaaaggaatggatgacgccctttgacaagtacagctatgatatggtctatgtctgcggactggagattgaagaacccacgggtttagatttgattgaatatctggaaagccatccggagcgggaactcttctatgctcccggtccgcggggaatacggattggtaaggaaaaaatggagcggatttacgcactccaccccattttgcatatcaatgagctggaatctaaggagttaagcggatgcacttccgcagaagatgcggccgaaaagctctgtttccttaccggcaacacggtaatcgtaacgctcggtgaaaacggcacctattgccgcgaacgctccggtatcgcctatacggtgcccgggattcccactgccgttgtcgatacaataggtgccggagactcccacatcggagcggtgatggcctccctgagtctaggaaacagcctgagaaaatctattcatatcgctaataccgccgcgtctgccgtggtcggtgtaaagggagcttccttaacggaaaaagaattccgggaaatgtcaagatgttggggtcaaaaggtcttttgaccctggtaacagaaagactgcgctttcgcgcaatctttcttcttactttatctcatacaaccagtttttttactgtcttggattgtccggacaaacgttccagttccatctgtcccctgtacaccctgtcggttgcaagttttatattgtgcagatgcttttcaataaacatgattcccgccgcataccggttaatctcctctatcatatcctcggtcaggcggatggctcccatgtatattatattagttctggtccggttccacagagactttggaaagtgaaatccatgctctgccaaaagaagtcccaggttattcaccgaaatcctgacagaagaacgcagcctctcttccaaagaccggcagataatatccgtaaattcaaaacacgtctgaagttttctgcgtatatcctcacgctccatcaggtaaaacgtatcatccattccggactggcgccttatctccatatccgccataaacatcaggtacagcttctcccatgattcaattgacaataccgcctgctccatgcggctgcaaaggctcttcatttcctccatctgaaccgcacgtttacgaagctgggccctggtcccatccagcatcttgttttcaattcccttcagctcaaactgagcctttttcagccgttcatccaggttcacctgtatccggcagtcaatatgaggccacatttcttcatcagcagacagactttcgagatttttcatctcatgctctaaaagcgttttaaccgcttccttcagtcctgccttttcattcccggaaattttcttctggctgcattcgatcatatgccctaaaatatcccatacaacctcttcggcaagttcccggcactgcgcacaaagcagctcggccactacgccgcagcacctctttaccttttctatttttgcctcttcactctctataagtaatttttgtttcactatctcacgttttaattcttcaattctctcaatggtatccatgcttgttctataattctcccctccgctgccaaatgcgaacaaaatatcatcccagaattagcgccagccataagcaaccttttgaaagtagattataaatcaaatgaaatcgccgtatgagagagtacgcttcgcgcacacccatgttaatcagcgataacctgcacgctccgcgaacagatcaccgccatcaataaaagcagataccaaaaaaggcatctgcttaacgggtatccaaaatgattgcaactggctgtcatatacttctacttagaccctttagctttgcgccaccgcctttcgacgggtttgccaaatataatatttgttagtagtcattatactttattttatttggaagtgcaaatggtttctttgaaaattaccaggaaatttaagaattgttccaaagagtgaggggagaatcggtgaatcgggtgaaaatattatccgtaattggataatattctgatagcgcttccgtatccgttctcctttttttgtaggccggcacgaagaatgataggaaatcacaacgtaccttctccataccagcctataggaaatccggaaaatcattccgtaaacgagattctccgtcgcgatttttacatctcctgcagcacccacaacgcataatccacatatacattgcaggcaatcagcaggccgttttcatccaggtcaaacaagccgtgatgatggggaacccctgtattcggttctgcaggattgtgggtaccgacaaaagcgtacatcccctttgtcaccgccagataatccgcaaaatcatcggctccaagggctttctcataatcactgataatgtcatcttccggaagaatcttttcaacgacagccctgacctcatcaaccgcccggccgtcatttacaagaggcgccgcataatcgcgaaactctacttctgcctcggcgccataaagcattgccgtctgtttcgcaatccggatgactctgtcattcgtgaattttctcacttccggaccgaagctccttgtagtaccctctatctcagcatgctccgcaacaatattatactgtgttccggctttaatcacacctacgcccacaacgactgtttcgagcggatctgtatttctggctacaatgctctggagtcccacaacaatctgggatgcaatgtaggcggcatcaatccccatatgcggtttcgacacatgggcgcccttgccggtcacactgattttaaaataatcgcagcttgcattttgaggcccttttgtcagcgatatcttccctgtcgtcaggccgctggtcacatgggttccgaagacccggtccacgccctccagcagtccggcacttacaaactgtctggccccctgcccgatctcctccgcctgctgaaagaacagccggatatgtcctgcaaattcacctttttttgcgttcaatatcttcgccgccgtcaaaagcgtggccgtatggccgtcatggccgcaggcatgacaaaatccttcattctgcgaacgatattcctctgtctttaagtcttccattgccagcgcatccatgtcggcccggagggcaatggttttaccttcgcccttctctccgtcaatccaggcatatacgcctgtttctccgactcttttgtgcaaaagaccaatcttatcaagctcttcctctatttttttacacgtattatattccttcaggcttacttcaggatgagcatgaaaatatcttctcaggctgacaaggtaatctttttcatctgttacatactgctttaatgccattttaccctccatccgtgccggctagtacagcattgcacttatttcaaaatcggcagttcagccgacgcagttattcagcgtcatcccatgcgcagatgaaagcgccctggtattcgtcttcaatcgtcttttttacttccggtgtatggtaagcgtccacaatcttcttatacacctcgttatctctatcggctgtgcgggcagcgattacgttaatcaactggggaaccgcctcgtttgtggaaggatctacattttctgtatagatagaatcttcaaccggattaagtcctgccgtaaatgcatttcctccattgataatagctgccgcacagtccggaagaatattggccagtgttgcagattcagcctccttgatgtcaattttcactttgtattccgtgatgtcagcctttgtcggtacatagcctttttccggatcacacacgataaaaccggcttcctcaagcagtttcagggcgcgtccgccgtttgtaagatcgctcggaattgcgattacatcgccatctttaatctcttcaatagaagaaatctttttcttattattgtagatggaaagaggggcgataatcgtgtcgccgatatctacaatgtcatatcccttctgggccacatcatttgcaaggaatgctttgtgctggaatgcattgagatcaatctcaccgtcatttaatgcacggttcggagctgcatagtcggtaaatttcatcagttcaacctggatgccgtcatctttcagcaattcattgatcgtgtcccactgtgcgttgtattcccctacaacacctacttttaccgtagttacttcagccggttctttcgctgcttcacttccggctgcctcactgcccgccgctgcggtagaagccggcgcattgccgctgcctgaactgcagccgaaaagtgaaagggctgttacggctgcaaatgccactgctgctgtttttttccatgatgctttgaatgtttttttcataattttctctcctttttctaattaaaatatatttaaatattactatttaaaacataatcattccgtccggagcagaccggccgttacttctaatgggtcgttttcctgattatcaggtttccgataaactggatagcgctgataatcaaaagaataatgataaccgtagcccaaatcatgtcgcggtaccccatctgatagccataccggatagcgaaatcgcccagacctccggctccgatggctcctgccatggccgtaattccaatcaggctgacaaaggtgatcattgtgacacgggtaatccccgggatgctttctttcagataaactccgaaaatgatttcaaccggtgagaagcccatcgcctcgctggcctcaatcaggcctccgtccagatccgccagaaccgattcaatctgtcttgcaaaaaagggaacggttcccgcgatcagggccacataagagccggtaacaccggagccggttccaacgatagcccggctgaccggaatcagcaaaaccatcaaaataatgaatggaatggaacggatgatgtcgatggctttatctaaaaagttatagattaccacattctgtaatattccgcctctctttgtcacaatcagcagaaccccgaaaaacaggccaagaaaaaatgcgatagtacctgatatcagcagcatcttgaatgtctgcccgatacatttgacaagctctccgcccaggcgctccaggttcggggctaaactgtataatatattcattctttaattacctccacttctactcccagtgagtttatgtactccattgccttttccatcttatccgcctcgccgcttaaagtcaccaccagcttgccaagcggtttccctttcaagaaatcaatatttccgaaaatgatattggcccggatatcaaatgccttagcaagataggaaatcagcggctcccccgcattggcgccggaataggtaaaaagcagcattctgtcaccggctccaatctgtgtcaattcatttttatcctcaattaaatcataaatcttcctgatattgcttgccgtatctatgaagtcccgggtgatccgtacctgagggtggctgaatacatccacggtatttcctgcttcgaccacggtaccctcctccataatggcaaccctgtcacagatatctttaacaacagccatctcatgggtgatcagcactattgtaattcccatctcctcatttacctttttgagaagcttcaggatggactgcgtcgtctgcggatccagtgcgctggtagcctcatcgcagagaagcaccttcggatcattggctaaggctcttgcaatggcaactctctgtttctgtccgccggaaagctgtgacggataggcatcccgtttatccgtcaggcctaccagctccagaagagacgcgattttctcttccctctcattcttcgtaagtttcgtctttttaagaggaaattcaatattctgatagacagtcctggaacgcatcaagttaaaatgctggaaaatcattccgatttttttacgaacttctctcagctttttttcatccaaatccattaagtccacttcatcaatcagaacacgcccctgcgtcgggcgctccagaaggttaatgcacctcactaatgtagattttcccgccccggaaaatccgataataccaaaaatctccccgtcctgtatttccagattaacgtcttttaccgcatggacattaccggatttggtgtcaaatgttttactcacctgtttcagcttaatcattctttactcctttcgatttcctgttccgtaacagttcagacagcatgaaccttcctgtcttttcaatatcgttcaggaagtctccttccatcattatttaaaaaccgggatcaaaaaaagctcccgccctgtattaggacgaaagctgctgcttcgtggtaccacctaacttcgtctgacgctcacgcaatcagacctcttcaagtacggccggacatcgacaggccactttcgcggcttatctgggaacggtttatactctatcgctgtaacgggcgcaccccgtcatgatctaaaatattcgaccatgcaactctgagaccatcttcataagcctatctctgctccctctcagcatccgggaactctctgtaaaagcatccgcttactactcttctcttctacgtctttgctggtaatcaatttatcaacttgcgattatattattgcattttttataatttgtcaacctttttttaagtaattttgcttcggatgagcaaaacggggtgatggagatttaactgaggtttggaggacgcgttcagaacggacctggtccggtgtggtgagggattctctctgagtcttccgtccccggttggaggttgtcgtgttgggggaatccggccggaatgaattgctgcggggtccgtttgcactctttggagtgcgcagcagtgctaagctcgtgagggacctcgctaagcaccggcggactcccatgtcccctccgcaattgattccgcctacttccccgggtcaggttttcgccgtggacggaagactcaggcggaggttttcgcggcaccggacatgatccgttccgggcgctgattgtctccaaccttaaatggggaggaccctgtcgcgaccactacgtgtttccggcaggctgatatcaaatcctccacatttttttataacagaccgtatttcccgctcacggaagctcttagtggccgcgacaaggtcagccccccgcacttaacgcgtgagacattcagcggccgcaggccggcggacgggcgatacccttggccttgagtctttcgtcccggcgaaaacccggccttggggcggaggggaagataaagtctgcggatgccgttgaaacccatcgctgattagcgaggtcctgtcgagcttagcagcgcgatgcatttcacagagcgggagcgtactccgcagactttatcttcgcccgcagccccaacccacgacaatctctccccgggacgaaagactcatatacacaccccgtccgctggccgtaccggcggcgtcctcacctgcttaactaaatcctataacagtgtcccggccagcgaatgtatgttcccttttcttccgttttgtggtattctaactatatatactgaatttaattaaaatcccaaaaggaggttctctcatgatggatcagctctcgctctttgataaccgtgaaactacgtcccctcttgcaagcaggacccgccccgacaccctggacggctttgtggggcagaaacacctgataggagaaggcaaagtactgcgtaaccttatcgaaaaggaccaggttacttccatgatattctggggccctccgggagttggaaaaacgaccctggccaggattattgccgggaaaacacgctcctctttcatcgatttttccgccgtgacaagcggaataaaggaaatcaaaacggtaatggagcaggcggagaaaaaccgaagcatgggaatccggaccattcttttcgtggacgagattcaccgctttaacaaggcccagcaggatgctttccttccctatgtggaaaaggggagtatcattctaatcggcgctaccacggaaaatccatcctttgaaattaattcggctcttctctcccgctgtaaggtctttgttttaaaagctcttacagcggaggaactggccgaactgctagccgctgtggtaaaatccccaaagggctttgggaaccagcatgtgcaaatctcgaaagagcagcttttctttattgctaattttgcaaacggagacgccaggactgctttaaacaccctggagatggccgttcttaacggagaattggaccgttccggaacactcagcgtcacaaatcaggtgcttgaacagtgtaccaacaaaaaatcacttctctatgataaaaaaggggaagaacattacaatcttatctctgcccttcacaagtccatgcgcaacagtgatcccgatgccgccgtttactggctggcccgaatgctggaggccggagaagacccgctctatgtggcccgcagactgatccgttttgccagcgaggatatcggaattgccgatcctcaggccttaactcaggttgtggccgcctatcaggcctgccacttcatcggaatgccggaatgcaccctgaatctgactcaggcagttgtctacatggccatggcgccgaaatcaaattcgatctacagagcctatgaggaggcaaagaaggatgccggaaccatgatggcagaacccgttcctcttcaaatcaggaatgcgcctacccggttaatggcggatttgcattatggtgaaggctatgtctacgcccatgaaacaaaagacaaaatagccgctatggactgccttcccgcctctctaaaaggccgtgaatattaccgtcccggaacaatcggcgccgaagccccggtccgggaacgtcttgaagaaatcaggaagtggaggcgggaacatcccgccctcccgtaggctgttcagattctatttctgtcatccatcagttaaaaccagtcattacggcaatgaccattgccgccgatgcaaacacaaacagcactgcctggaatttaatctggaattttgcccacttgccccagtcgagtcttgccgcagccagcgctcccagcagacatccggatgtaggaacaataaagttactgaatgcatcgcctaactggaatgcgaggacggatacctgccttgacacacccacgatatcggcaagaggggccataataggcattgtcagcgccgcctgaccggaaccggaaacgacgaagaaattgaatatggtctggaatacatacatcagccatgcggacagcatcggcgggaaattcttcatcccctctccgatggaatggagtatcgtattgagtacggttccctccgtggcgctggttccgccaaggataataataattccctgagccataccgacacacagcgctgccccaaaagctccgccgcccctttatcaaatgattttgcaatgtcattcactttcatatcgttcagtttaaagacaacaccgataataccggatacgagccccatcacaaaaaactgggaggcgatctccgggatataataaccttcggcaataacgccccagattgtccatgccatagtcaggacaatcgtgaggataactagcttatgaccgaaagtaaacggcacatcttccttatttttcgatgaaaaatcatcgcggtaatactgatcggtttcatatgccacggaagactgcgggttctttttaatcttcaccgcatagcgcattgtaaatatgattgccgtcgcagtaaaaatcacccagaggacgattcgaaagccggcgcccgacatgaccggaatacctgcgactccctgggccacggcaaggctgaacggattcatccaggaagagccaaagccgatctgtgtcgccacatatgaacacatgatacctactaccgcatcatagcccagcgcaataaaaagcgggacaagaatcatgacaaagggaatcgcctcttctcccattccgaaaacagcgcctcccaatgaaaacaacgtaatcaggatggggatcagtagtatttcccgcccctccgtcttctctatcaccttcataattcccgattccacggcgccggtccgcagaacaattccaaatgctccgcctactaccagaataaaagcaataattccgaccgcagtaccattcttatccccaacggtcatgccttcaaaaacgaagtttaaaattccctggcctccaaaatcttcggttccgaaaatgggagccgccttcgtcactttattcccgttctcatccagcacataccggaaactgtcgggttctaagacggttctggttttctctgaaccattctgcatataggtgatttcttttgtttcatactgtcccagcggaataaacagggttaacactgctgccagcacaattacaaagaaaataataatatacgtgtgcggcatctgaaagcttttctttttttccatctctcatacctcttcttttagtattcaaaggtccccctcttaagaacctctcctccggaaacaaccgtctcacctccggcgataaccgtatcaatttccagtgtatccgaagcagacagcaccagatcggcgtctgcatattcggtaattcttcccttgcccttaagttttaacagaaatgccgggttggaagtaacggtcttcagcgcatcggcaagccgtacaccgtcctttaacaccgcatccttcatttcccggtacagtgaagatacttttcccacgccaagatgcctgaaatttcccttttcatcgaaaaccggaaggctgccctgcccgtcggaggaaaaggtgatatggccggcatccacacctgcatccagcgccatcttaagcccggctgatgcctttacctcatccggatccagaaaatcaggatcggaactggttgtcaaatcaatatatccgcccagccgtctggcgtaatcgattccgtccgacatcagggatttatttcggttaatatgggtcggcagcatattggatgccggaatctgggactctctcaaaagccggcgcaaataatccagctgctcccggccgtctcccatatggatattgacaatcccggctttgccggataatatgcctcccactcttgtatcagcgacaattctggcaaattcctcgtacgttggctgggatgagcggtgatctgaaattgcaatttctcctgtgcctattactttatcaagcaaaataaggtcatccgccacactgccggtcaatgtcctgaccggtacctgataggaacctgtataaatatacgcagtaattccttcttcctccagtcctctggctttggcaatcaggtttgtcatggttctcgttgtgccgtctgtccccagacagcccactactgtcgtaacacctccgcagataatatccgacagcataatttccggtgttcttgtcctgtatccgccttcaccgccgccgcccagaatatgcacatgggcgtctatcaatcccggcatcatgatttttccgctgccgtcgattacctcaacatgataagcctcttctgcgggcagtgattccccgattctaagaatctttcccccgccgatcagtacatccatgcatcccaaatcctccggtgcgtacagacaggcattccggatcagtttcatagctccgttcattttcctgttctccactcttgtttttattatagaagtaactgcaaatccaccgcctggttaccgtaccattcccgatttcacagacacactccggcgcaaattacagttcatattattttatcacatacatgatagaatgtcatagatttttgtattattattctggctgattttacgaatattgtaaaaatcttcatcagctccagccattcattcaaacacgacacatgcaagacataaaacaggacagaaccttattcatggggttctgtcctgttgccttttaccatataaacctgtagtgcaaaattatgtaaatacagcaattctttctgattattattgaaattaataattttcttttctaacctcaaaatagctctgcggatgagcacataccggacatacttccggagctttcttgccgattacaagatgtccgcagtttctgcactcccacattgtctcttcagatttctcaaatacagctttcatctccacattatttaagagctttaagtatctctcctcatgtgttttctcgattgccgctactgccgcaaatttagctgccagctctgtaaagccctcttcctccgctacttttgcaaattcagcatacatatcggtccactcataattctcgccttcagcagcagcctttaaattctctgctgttgttccgattccttttaattccttgaaccacatcttggcatgctctttctcattattagccgtgttctcaaaaattgctgaaatctgctcatatccttcttttttcgctacgcttgcaaaatatgtgtatttatttcttgcctgtgattcacctgcaaatgctgtcataagattctgctctgttctgcttccctttaattccattgttttattcctcctatgttttcttctgattttaggaattattcctgtttttatagtacactcttttccagcatttgtcaagtggtcgggtgaaatattttggagatttagttaagcaggtgaggacgccgccggtacggccagcggacggggtggtgggatgtgtatatgagtctttcgtcctgggggaggattgtcgtggttcggggctgcgggcgaagataaagtctgcggagcacgctcccgctctgtgaaatgcatcgcgctgctaagctcgagaggacctcgctaatcagcgatggatttcaacggcatccgcagactttatcttcccctccgccccaagggcagatatttcgccgggacgaaagactcaaggccaagggtatcgcccgtccgctggcctgcggccgctgaatgtctcacgcgttaagtgtgtgggcggaccttgtcgcggccactcagtgctaccgtgtacgggaaatacgatataccttcattgcgcctttataaaaggcgctagatttggtatctgcctgcggaaacacgtagtggtcgcgacaaggctctccccatttaaggttggagacaatcagcgcccggaacggaccacgtccggtgtcgaaaacctccgcctgagtgttccgtccccggcgaaaaactgacccggggaagtaggcggaatcaattgcggaggggacatgggagtccgccggtgcttagcgaggtcttttcgagcttagcattccgatgcgcactccaaagagtgcaaacggtccccgcagcaattcattccggccggattccccctccacgacaacctatccacggggacggaagactcagccagccccctcaccacaccggacatggtccgttccggacgcgtcctcccaacctcagttaaatctccagcttctcccccaaaatctcattcaccttcccgggattcgccttccccttcatctgcttcatcacctggccaaccagaaagctgatgacttttgtttttccgctcctgtattcctcaacggtctgcggatttgccgccaggacggcttctatcgtctcttccaggatactgtcatcatttaccatcagaagtccgttctctttcacataccgttccggttcaatatcctctttgaagattttttcaaatacttcctttgcgattgttgtattaatgctccccgactccgtcagcttgatcagtgaagcgagatgtcccggtgagaagataagctggtcggcttccaccgcattttccttcatcagccggctggtttcgcctatcagccagttagccgtttttttcggaagtccgcacagggctgttgtctgctcaaagagatcggacagttttctggattctgtgataatgcggctgtcatacccggacagaccgtattccttctggtagcgctccatcttctccggctgaagctccggcagggagtttctgacctccctgatccactcttcgtctatcaccaccggcaaaagatccggatccgggaaatagcggtaatcctttgcatcctccttcgagcgcatcgcaaaggaatactctttgttgtcatcccatcttctcgtctcctggataacacgcttcccggcctccaggatttctatctgccgcagtttttctccctcaattgcacgggaaatagccttgaaggagttcaggtttttcatctctgtcctcgtaccgaggccgtcacttcctgcctcacggacagaaagattcacatcggccctcatggagccctcctgaagcttgcagtcggaagctcccagatattgaatcagaagacgcagacgctccagataagcaataacctcctccgcgctgcgcatatcgggttccgatacaatctcaatcagaggcaccccgctgcggttgtaatcgaccagggaacagtcctcccattcgtcatgaatcagcttgcccgcatcttcttccatatgaatctcgtggattctgatatcttttctgccagaagcagtctcaatcgtgatatgcccgtcatggcagagcggcagataaagctgggaaatctgatagttctgcgggttgtccggatagaaataattctttctgtcaaatttgcagatcctgttaatctcacaatctgcggcaaggcctaccgagagcgccagttccacaaccttcttatttaatacgggaagggaaccgggcattcccgtacataccggacaggtgtgtgtgttgggagcggctccgaatgcggtggaacagccgcagaatatctttgtcttcgtggcaagctccacatgaacctccagaccaatgacggtttcatactgcttcttcatttattttccctccttatccggccggcagccgctaatcgggagttcccaccggccgcgtgccttttcataggccgacgcggcccgaaacagtttcttctcctcaaaacagccggcaatcatctgcagcccgatcggcagtcctttttcatcggttttacacggaacgctgatgccgggaagaccggccaggttgactgataccgtataaatatcacccagatacattttcaggggatcgcagagactctcccccatagccggagccgtagacggggcggccggtcccagaatgatatcatacttctcaaatgccctgtcaaaagcctgcttgatcagcgccttcgtgcggagcgctttcagataataagcgtcatagtagcccgagctcaatacgaatgagcctaacatgatgcggcgtttgacctctgtcccaaatccttccgagcggctctttttatacatctcatgaagatcctcacactccccggtcctgtacccgtacttcacgccgtcgaaacgcgacaggttggagctggcttctgcggatgcaatgacatagtaggccggaatcgcatattccaccatccccagatcaaagaactccacctcagccccctgggatttcagaagctctgccccctgcagcactgctgttctaatctcatcgtcaaggccctcgcccagataatcggaaggaatcccaatcttcattccctttgcctcgcctgtcagcgcctccgtaaagttatagtcctttctcggcaccgaagtactgtcctttttgtcgtgggaagccaggatttccaggacagctgcgcagtcggccgtgtcccttgccaccggccctatctgatccagagaagaaccgtaagcaatcagaccgtatcgcgaaactgtcccataggtaggtttaatcccggtcacaccgcagaaggagctgggctgcctgatggaaccgcccgtatcggagccaagtgcataaaacacttcgcctgatgccacggcggcacaggaaccgcctgatgaaccgcccggaacatgctttttgttccatggattggcagtaggaccgaaccaggaagtctccgttgtgcttcccatggcaaactcatccatatttgtcttgcccactatgacggctccggccttcttcaggtttgtgaccgcctgtgccgaataagccggtacaaaattgtacaggattctggagccgcaggttgttttcatgccctctgtgcatatattgtctttcaccgccatcggaacaccggccagaggccctgacagcactccggcgtcaatgcgcgcctgtatctcctccgcattcttaagcgccttttcctcttccagcgttatgaaggcatgaaccgtttcttcactctcacgtattcgggaaaaggatgcctccaccgcttcttttaccgacactttcttttcttttatctgttttcccagctcaagtgctgtcaattctaaaagtcccattatttcctcctgttctccgccgtcagcggatagaacgcgcggcagcccgccgtttgccctattctaccgtacgcggcacctgatactgcttatccttctgccggggcgcattggacagcatctccccggactgatccccgtttgtaatctcatcctcacggaaaacattgcttatatcgaagatatgggacataggagctgttccccgggtatccagttcattcagcttgtcaatatattcaagcattctgctcatgtcctcaccggctttctttttttcttcctccgaaagattcagctttgccaggattcccacgtattctattattttatcgtctattttaactgccatattctttccctctttccttttctcctttaccctgcccgccgcctgccaagcttatggtacgagacggctcatatccctcgggaacagcgacacttccctcacgttctcctcacccagaagctgcatcgtcatgcgttcaaggccgattcccagtcctccgtggggaggcatgccatatttgaatgtgtttaaataatcatccattccttccgtatccatgcctcttttctcaatttttgcaagcagctccctgtaatcatggatacgctgtcctcccgtcgtcacctccaggccgcggaacagaaggtcaaagctcctggtgaatctgggatcctccggatcatccattgcatagaacggtcgttttttagaggggtagtgtgtgacaaatacaaaatcagcgccgtattcttctttgaagtaacgtccgattaaatgctcctcctccggttccagatcatacgggtttttaatgacggtaccatacttttcagccgccagctctttcgcctgcgtaaatgcaatacagggaatctcatccaccttcggcagctctgccctgagtaatccaagttcctgaccgtattccgtcctgagcagtgataccatatgctgaagaaaacctgtctccattgccatgatatcggtaaaatcgtcgatatagcccatctcaaaatccagccctgtgtactcattcaaatgacgcttcgtgttgtgcttctccgcccggaataccggcccaatctccatgacacggtcaaatacgccgaccatcatctgcttatagaactgaggactttgggccagaacggccggccggtggaaatagtcgagtttaaagacgttagcccctccttccgctcccctggctccgattttgggagtatggatttccgtaaatccttcaccctgaagatattcacggaatgcccgggcaatgccttcctcaattttaaaccttgcgcgctccctcacatttctcagcgttagaggtctcatatccagcctggcttccagggatgcccccatcttccattttgataccgcaatcggcaccggcgcttccggccgcgagagaatcctcacgccagtcaatcgaagctccacgccatgaggcgctctctcctcgggttccacaaatcctgtcacctcaacaaatgtctcttctttcagctgtgaaagctcagccttcgtcactcccttctcaaacacggtctgcaaaacgccgtcccgttttctgagaatgatgaaagcgatatcccccatattcctgatattcataactgcgccgtttactttaacctcctgccccgtcttcccatacgataaaagacttttaagctccagaacttctttttcttttcttcctgttaaaaattccatctcttttcctcgctttcttctttttattcgatgttccgtccggacgtttaaataaaaaaagtcccggaacatctttcgacattccgggacgggatattcccgcggtaccacccgcatttgaaaagtaaagcagcgcttatatcttctcactctcttttatgcttaacgcgcatacacgtgacggcctactttgaagcttgtttcgggcgtccggctccggagtgttccctattgttttattccctcctgacgcggctctcagccggtgaccgcatctttctgtcggattctttaaaacagagtctccttcactgcctttacatgaaattttatggtcatcactatataccatttttgaaaacttgtaaagcactttttgaaatttccagaattttctccatctttttttattaagaattttttaaatgcgttgacatccggccgcctatgcatataatttacctgtataaataatatcagatacgcttttggggcttatcggatacttaccgccagacagggataaaagcgtggtctgagaaccttccgccgccggtcgggtaaaaaaatttgttcatgaaatcaattactgtatcattagacaggaaccaaaaaacggaggaaaacatatgtgtggaattgttggttacatcggagacgagcaggcggctccaatactgctgaacggactcagcaagctggaataccggggctacgactcagccgggatcgcagtttacaatggaacagaaatcaagatggataaggtcaccggacgcctgcagcgtctaaaggatcttacaaaagaaggaagcacgctccccggaaccgtcggtatcggccatacccgctgggcaacccacggcagtccgtctgataccaatgcccatcctcatttcaataaagatcgctcgatcattgttgtccataacggcatcattgagaattacagcaaattaaaacagcgcctgatcggcaaaggctacgaattcgtatcagaaaccgataccgaggtactggctcacctgctggattattattacaagcgcagccataacccgcttgaggcgctcaccagggttatgcagaaggtggagggttcctatgccctcggcatcctcttcaacgactatccgggccaggtcttctctgccaggaaagacagtccgctgattgtcggccacagcgaaagcggtaatttcatcgcctccgatgtcccggccattcttcagtatacaagggaagttttttatatggagaacgaagaaattgccgttctcagccgtgacggaattaaattttacaacgtggacgaggaaccgcttgaaaaagaatgcacccgcatcgactgggatgtcaatgccgctgaaaagggaggttatgaacacttcttcctgaaagaaatctatgagcagccaaaggcaatccgtgacaccatcagcccccgtatcagggaaggtgaagttgtcattgaggaactgggcatgacagatgaagacatctgcaatattaataaaattatgatcgtggcctgcggctccgcttatcatacaggagtgatggccaagtatgtatttgagggaattgcaagagttcctgtggaagtggatctggcatctgaataccgctaccgcgatccgatttttgaccgcaatacgcttgtcattatcgtaagccagtccggagaaacggcggattccctcgctgctctcagagaatcaaaagccaacggccagagagtcctgggaattgtcaatgtggtgggaagctctatcgcccgcgaggcggataatgtcatgtatacctgggccgggcccgagatttccgtcgctaccacaaaggcatacagcgctcagcttgcatccttctacctgctggccatgaaattcggaaaagtgcggaaagctctggcggatagcgactatgaacagatgattggcgatctccagcagcttcccgggatgatggaggaactcttaaaggaccgccagcagattcagagatttgccaaccgttacctggccgccgagcatatcttcttcatcggacgcggtatcgactatgccatctctatggagggttccctgaagctcaaggagatctcctatattcactctgaggcctacgcggcaggcgaattaaagcacggcacaatctccctgatcgaggaaggaacgcttgtagtggctctcgcgacccaggaagccctctatccgaagacagtcagcaatgttgtggaggttaaaaccagaggagcttttgtgatggctttgactaatgaggataatacggaaatagaaaaagtatctgactttactgtttatatccctaaaatcaaccgttatttttccggttcgctggcaattatcccgctccagcttttcgcctattatgtatctctcggcagaggccttgacgtagacaaaccaagaaatctggctaaatcagtgacggttgagtaagtcggaataagtgctgaacacagaccagtcggaacgccttcggatattctgagtttttttaaaaacatagaaggaaaatattgacattctgttttatttatgtatactactgatattagaaaagcaaaggcgcttcggtataaccggagtgcctttttttcattcaattgcagggcggtcagaggttctgcacggcactgaatctgaaaggagacacgattatgaaaaaatgtattcccgagctttatggaagtcttgtattcaacgacaaaatcatgaaaaacaaactcccgggagatgtctacaaggccctccggaaaacaatcgagacaggcagccatctggaactggatgtggctaacgccgttgcggtcgcaatgaaggaatgggccgtggaaaatggagccactcattttacgcactggttccagccgatgacaggcattactgccgaaaaacatgacagcttcatcaacccggtcgggaatggcgaaataatcatggatttctccggaaaagagctggtcaagggcgaacctgatgcatccagtttcccctcaggcggccttcgagccacctttgaggccaggggctatacggcctgggatcccacctctcccgcatttattaaagacggcactctctgcatccccaccgccttctgctcatacagcggagaagtccttgataaaaaaacacctctattgcgttctatggaagccataaacaaagaagcgctccgagtgctgaagctatttggcaatgaagacgtcacccgtgtctactcgaccgtcggtcctgaacaggaatatttccttgtagataaacaattattcaatagccggaatgatttaaaattctgtggcagaaccttattcggcgcgccggccccaagggccaggagatggacgatcactacttcggcgccctgaggccccgtgtctctgcttttatgaaggagctggatgaagagctgtggaaattcggcatcccggccaaaacaaagcacaatgaggtggcgccgtcacagcacgagctggccgtcgtttacacgactgccaatctggctgctgacaacaaccaactgaccatggaagtaatgaaacggactgccgaaaagcacggccttgtctgccttctccatgagaaaccatatgagggtatcaacggaagcggaaagcataacaactggtctctttccacgaataccggggtcaatcttctggatccggacagggagccggcgaaaaacctgcaattcatgctgtttttagcagcgacaatgaaggcagtggatgtatacggcgatcttctccgcgtatcggtggccaccgcgggcaacgatcaccgtttaggcggcaatgaggctcctcctgccatagtttccatgttcatcggcgacgatttggcctctgtccttgatattattgaggcagatgccgaatcggaggcaaaggagacggttaccatgaccgccggtccgaaagtgctgccccactttataaaggatacgaccgaccggaacaggacctccccgtttgcctttaccggcaataaatttgaattccgcatgccgggctcctccctctccgtatccggaccgaatgtaatcctgaatactgcggttgccgattcgctcggagcattcgccgaccggctggaaaaagtcccggccggcaagctggaggaggaaatccacaccctcttaaaggaggtgatccgggctcaccggagaatcgtcttcaacggcaacggatatacggaggattgggtaaaggaagccggccggcgcggcctgtttaaccttccggcctgtgccgacgccttcccctgtttcattgcagaaaaaaatattgttctttttacaaagcaccatgtatttacccgggaagaaatcttctcccgctatgagattatgcaggaaaattatgtgaagacaatcaatattgaggccaaaacaatgtgttccatgatgtacaagacgttcctgccctccctgctctcatacatagaaacaattgccgaagcgacggaaaaaacgaaaaaggttctcccctcagcgcctgtcatctcccaggaaaaattgttaagcaccctcgcccggctttatacttctatttcagaaatgaccgaagaactgaagtcagccattgtcggcgccgattcaatcggagattccatggaaaaagtaaggtattttaattataccgtacttgccaaaatgaacgggctgcgcagctttgtggatgaagcggaggccctgattcccgaatccttcctcacgtatccgacctacgacaagcttcttttttccatatagtgattaagtaacaatattcagggaggatttaaggtcatgcagccattagaaatacagacaggaatcaaagaagagtgcggtgtttttggaatctatgatccggagggtggcagcgtttccacggatatttactacggtctcagcgccctgcagcaccgggggcaggaatcctgcggaattgccgtcagcgataccgcggggccgaaagggctggtcctctgccgcaaggggctggggctggttaatgaggtgtttgcagaggaaaccctcaaaaatctgacagggaacatcggcatcggccatgtccgctatgccactaccggtgccggtaccctggaaaacacccagccgctcgtattaaagtatatcaaggggactctcactctggctcataacggaaaccttgtcaatgcagcgcagcttcgcagagagctggaagagacaggagccgtattccagacgacaattgactctgaggtcattgccttttacattgcaaaggaacggctcggcactcccaccgtggaggaagccatcaaacggactgccgcgaaaatcagaggggcctacggtctggtcatcacaagtcccagaaagctgattggtgtccgcgatcccttcggactgaagccgctctgcctgggcaggaataaaaacatatggatgattgcgtccgagagctgcgcaatccaggctgccggtggcgaatttgtccgggacatcgcccccggggagattgtcacgattacaagggacggtctgcactccgatatgagcctgaagcaggagtttcatgcacactgcgttttcgaatatatttattttgccagactggacagccggattgataacgtgagcgtctatgagtccaggctgcgcggtggcgccgctctcgcccgctcttatcccgtacaggcggatctggttgcaggcgtgcctgattcgggacttacggccgccatgggatatgcaaaggcatccgggattccctttgaaatgattttccacaaaaacagctatgtcggaagaacatttatcaagccaaaccagaaagagcgtgaagacagcgtgaaaatcaaattgagcattcttgagccggctgtcaggggaaaaagtattgtcctggtcgatgactcgattgtccgcggcacgacaatcaagaacctgatccggatgctgaaacaggctggcgctatccaggttcacgtaagaatctgctctccgcccttcttatatccctgttattttggaaccgatgtgccttccaacaagcagctcatcgcatacagccactccgtagacggaatcaggcaggaaatcggagccgattccctggggtatatgccggtcggggatttgaatgaaatggcgggcggccttgcgctctgcacggcctgctttaccggaacatatccgatggatgtgccagacggagaaataaaaaacgctctcgagcaatcgggatgactgcgtgcgtcttaaataataacatttgattttattggtaaaagctactataatcaagccaaagataaaacttattttgttcaaatagcagaggaacaaagaaacaccctctgtctgaagaaaggagtgattatatggcacgattcttatcaaatttaggagaagcaggtattatattgaacattgcaatcatgcttgcatccggttttctgctgacccgcattaccaaacgcctccgtctgcccgatgtcaccggttatatcatttcaggcgttatcatcggcccatggtgtttaaaactaatcgctccggacttcattgaacagatggattttgtcacggatctggccctggccttcattgcattcggagtcggaaaatattttaaactttcagcattaaaagcaaatggaaaaaatatggtaatcctgactctgtttgaagccctgatagcaggtatctttattaccactgccatgcttcttatgggactctccctgtcattcagcctccttttgggtgcaatcggctgtgcaaccgctcccgcctccactatcatgaccatccggcagtacaaagctaaggggccttttattgatacgattcttcaggttgtagctttagatgatgccgtagccctgatagccttcagcgtctgtgctgcatttgtccaggctggttccaaaaccggtcatatttctgccggacaaattattttaccaataatattcaatatttcagcgcttgcgcttggtgtattatcaggaattctgttaagctatgcaatccacagaggacacagcaaagaccacagcctcgtccttgcctgtgtctgcatcatgggcgtggcgggaatctgttcctccatggatgtatccccgctcttagcctgtatggccaccggtactgcctatattaataccagcggcaataaacatttattcaaacagatagatcagttcacgcccccgctgcttgtgattttctttgtactttccggaatgcgtctttctattcccagcctggcagcggccggaatgattggactcgtctattttctggtgcgtattgccggaaaatatgtcggctccacgattggcgccattatcaccaacgcttcctctgagatacgtaggtattttggactggcattaatcccccaggccggcgtatcaatcggacttgccgtactcggccagcgtatgctcccgtctgacagcggaacactcttgtccactatcattttatcaagcggtttattgtatgaaataatcggaccggcctgctccaaactggcaataaaaaagtccggaagtattcctgttaaggaaaataaatagggcgacggagcagacagcggctgaattatgctttaattgttaattcggttagccgctcctgctccctcagctcccatgcaatccgggcactttcttccaattcttctaaattgaaaaaagcatccataagactgtctccccctgcaacaggaccatgatgtgcgagaagatatccattttctttgccggtccgtctggaaaattctgagaacagctcttcgcttcccggtttttcgtaggaaacaagacgtacttttcccagcttcattcccaaatacggcgtataggcgggaattacatcatcttcctctcccttgtggggaaggcaggaccacagaacgctgtaaaagctgtgaacgtggatcacggcctgtacttttccttctgctttctgatacattacaagatgaaggggaagctccttgctgggctttttcccattgagtacattgccgtttctgtctgtcaccgcgaaggaatcttccgtcaaacagccaaaacaactgcctcccaccgtaatgtaaacacgatccttatataaaaagctcatatttgctgaagagcctgaggttttgtttctttcaaacagactcctcccaatccagcacgcatcggacagccgtcttttcagctcccctgtttcctgtgctttcgtcatatcaaatgctcttgagaagaaatcatcctgaccaaagttcccggattttaaggccatacgaatgttctggttgtgtagcggaatcaatacggggactcccggggcaatgctttcacctattataaaggcatcaaaaccaagggccagagttacggctcccgaggtttcgcccctgcaacaataatgcgggtgtatccttcatcaaatgcctttttccccagctccgccatagttttttccaatatttccgatgccgccgcagcctgggactcgtccgcatatttccggctttccggatccgtggcacctgcactgtatattaaaaattccttatccggatttttcaatatctcattccatatattttctgtagtctgaactccgcgaagaccttcggacgggtaaacggcaatcgccggattattctcccgataggctctgcactgtcggcatgtggcggtactgcagcttcctgaaagtgcaattcccttcccctccgtccaggtcggaaggatattctcgccctgacattcatattcctctctgtattgggcggcaagatgctccaaaattcctgaaccgcctgtcagcagacgttcctttccaaatacttctgcaatcttttgcccctgattatccgttgtataatccggaatgatatagaaatgagagttattttcactaaactttttcacttcctccataatcatttcttcggaacatgaaagcagctcctcaccgattatcatgcagggatattttccctgcggcttcatcagggcggcaagctccgatgcccaaatagggttgaggggatgatgtgccatatgaccttcggcaataggctttccatccacaatcagaaccccatcctttacaattctgcggttaaccggaagtgacggacagagcagtgtatatggaatctcatatttttccagcgcagcatcgataacgggacctatatttccctcaggggtcgaatcaaaggttgaacaatatttaaagtaaaactgttccgcaccatgcgccctaagccactcaagagctgccagagtatcacgcactgcgccggaggctgcaatactcctggtcttcagggcaataacaaccgccgcacagtcacgcacaacctcggtatcttttggaattccgttaaacagaagtgttttgattccctgtttggcaagaaacgaagccgcatcactggcgcctgtaaaatcgtctgccacacatcccaaaagaatgtgatctaatttttttttcaatgaactatctcctttactgttataaatttaaaacaggctgcagaactagtaggcccagcctgtgaaagccggaatgtaggtgacaagcatcaggacaataaacataattccgataaatggtatcagcgccctgctgatttgggggatgggaaccccggaaacattggatcccacatacatagccgtccctaccggagggctcagaagtcctatggtcaggttgataaccataataaggccgaactgaaccagatttaccccaatggatgttgcaaccggacacaaaattggtgccagaagcataatggccggtccgctgtcaatgaacattcctgtaatcagaagcagtatattgataagcagaagaagcaaaaatttattatcggtcagtcctatcatccagttggtgatcttggccggaatctgctcgctggtcagaagccagctgaacagggtcgtagccgcaatgattgtcccgatggtggcactgctctctgccgcctccagaagaatcccgggtaaatccctgattttaatttctttatatataaacatccccacaagcagtccgtacaccgagataatggcgcctccctcagttgccgtaaaaatcccgcctctgattccaaatacaataatcagcggcatcatcagtgcccaaaccgcgctcttaaatcgtctccatatctcatctctgctgacggcattctccttcggatagtttttctttttaccgatgacgtagcagtaaattaaaaatcccattccaatgcagattccgggagcatacgccgccataaataaatcgcctatcgatacgttagccgtgcaggcgtagataatgatcgcgattgatggaggaataataagcccgatggaaccgcagcaggcacatagcgcgcctgaaaatggcctttcatactttctttttgtcatctccggcaccataattgcccctatggctgcggcgtccgcgacaccggaacctgatattccccccataataataccggtaattgccacgaccatggcaagcccgccgcgaatcgggccgacaaagcagaggcagaaatcaatgatacgcttcgtgataccgccgtggctcattaaagctcccgcaagcataaacaatggaatcgccatcagcgggaaagaatctactgcggtaaacattctctgggccagaaccgtaatcggataaccggcgtgtccgattgccgccagtgaactgactcctaaagcaaaacctacgggcagtcccataaataagaaaacaaaaaataatgcaaacagaataacacctatcatgcgttctgatccccctttctaaataatcggtataactttaaaagtataaaaaagaggcttattattccgcatataggaatacataaataaatataattcatagggattctcatagtagcgcttttctgtttttcaccgacctcgcacagcttaatcccggcataggtaacggctgagaaaaaaagagcgctgaatatgtagatgacagcatataaatttcttccggactttccctttaaaaatccgggaagaagatccaaggcaacatgcttatctgcggcaatgcatctggccataccgataaaaacaatccatacaaacacataccggcccagttcttctgaaaaattaagtgccgtatggaatacgtaccgcactaatacagcggcaaatatatcaaccatcatcaggaacatcagggctgctaaaaagcatcccgtcacattcatgattcctctttccagttttttcatctataaatcctcctgattcaggggcgggtatcagtttttacagcattgacgcattttggcacccgccctgaattttcatgatcagcggcctaaagtttcctgaattttgttatataaatcaagttgtccgatgcttttggcatacttcggggcaacctcatccgctattttgataaatccggaaatgtcaggatctgtgacggtaacgccctgattttccaccatatccttaaggttttcctctgttacccgtttcgtctcctggttctcatattccgtcgcttcctgagccgcctgcatgataatcttctgctgctcctccgacagtttggaataggccgtatccgacatggccatagtcacatactcatatttgtggttggtgttggcaatatatttattaacttcatatattgaacctgaatagaagaatggaatcggattttcctgtgcttctatgactccctgctgaagactcggatatacctcagaccagctcatggttgtagcggctgctccccacgcgctgaatacctgttccatggcactaatctccgggattcttatcttcagtcccttcatatccgctacactgttgattggcttactggaggtaataagacgcgggcctctctcccaccagttcagaatacggattcccgatgtatccagaacatgagccgcaatctcttttccgacgtctccataaataaccttttcaaattcctcgttactgcggaacaagtacggaatctccagaaccgatatggtatcgtcaaaattacttaaaactcctgcaataagtgagatatcaacggttcccatcatgagcccctctgccatatcccggtcaccgcccagggtactgttgggataaatctcaatctttatatccccgtttgacagctccgacacgcggtcggcaaacttgacggcacccagattccatagatccgactccgactggatatgtcccagtttcagtacaactgaagcactgccgctatttccatcctccgcactgcctgtattcgtcttattttccttatcttccccgctctttgccgattctgatacagatgaggaactgccgcaggcagtcagcatcccagccatgataaaagccatcataccggccaacattctttttttcatataaagcctcccttagttatatcaggttttattctcctatttttatcaataccttaaccacatcttcttttttccggctgagaatatccagtccttcctgcgtcttctcaataccatccatctcctgggtcacataatccgtcagatccagatccgtattaatcatttccatggcttcagcgaaatctccggactcatagcacatcgctccgtaaatctttaattcactaaatacgaccgaataacaataaaatggtatcttattggttatcatggctacaatgcctatttctccgcatttatgtacacattcacaggcctgatccagaatattatccgcgcctgcggcaataattgcgaggtcggctcctctgccccccgtcatctcctttactttttcgggaatattttccgtaacgggatccaatgctgcatcggcaccatgctttacggcaaattctcggttaaacgctgccgtatccgtaacgatgatgggactatagccccgtttcctggctaccgccagaatcagctggccgatcgtcccggctccaagtatgaccagtccgccggttctggtctctgcatggttaaccgtatggactgcaaccgcaagcggttctgcgagagttcccatctcataacttgtctgatcggccagtttataaactgtcttttcatctgcattgaaatactcggaaaaagcaccaatccattcaggagttccaggaacctttttccctgagcacaggcttacaaggcctcttttacacatctcacattcaccgcagcctacctgcggctccactgtcaccctgtcaccaactttgatattcgtaaccttactgcctatttccaccacatcccctgcgatttcatgccccaggatagcaggcgcatgacgaaatggatgagttcccctgaacaaatgaagatcggaaccgcatacccccacagtttttgtcttaattaacacctccgtatctgagatgaccggcttgtctatctcttttatctctaccttttcaattccagttacaaatgctgctttcaaaataatccctcctatagtttaatcgttattttttccggcaacgcgcgctttgctcttttatgatactaattattacattcaatcgtgcaaaataaaaggatatttttgatttattttgtattattttgatacaatactgtatttttatcatttttactcgttaatatcttgacaattctcccgttccattttatacttgtatcataatgatacaatttcattttagagaggagggattccatcatgacagattctaacaatcgtgtaaaaattctggttattgccccttatattggcctggttaaactctttgaggaagcggcgcagaaatttgataacatcgaactgactgcttatgaaagtgatacaacaaaggctgtctcttttataaagacgctttccatgaatgactatgatatcataatctcacgcggatatacctgcaagatgatccgggaggcatgcgggagacatgtgttagatgtcggcatatccatatatgatgttctgagaacaatccgtctggcgcagaattataatggacggtttgccgttgtgggatttcacagcatcatttactatgccatcatactaaaggatattcttcgctatgaatttgatattttcaccctcaaatcaacggatgaaatagaaagtgagctgaacggtctgaaggatgccggttataatatgattgtgggggatgttgtcaccacacagacagccaaaagcatcggtcttcaaaccatgctaatcaccaccagccctgaaagtgtggatgcagttcttaacaacagcctgtctctttatgaagaacagcttctcctgaaaagggaccgtgatttttacaaagatctgatctgcggcatggatgagggcacggcggtctacgatcaggatgagaacctgctttacgcaagccggctggaaaataccaaatttaaaaacgtcctgaaaaaatcggttgcctcattgtatgaaaaaaaggaacttcacttagttaaaaccattgaaaacaaccgtttcctgattcatggaaaggtaaggcggctttccgggcagctgtttgctgtattttattttaaaatcatcgataacgaaaaaaaagacagcggactgctccgctactacaacaatacggatactccttttgcaagccaaagaaccttttacacccttagtccttccctcaaggtatccttagatgagattaaatcgtttcagttttttcagagaccggtatttatcaccggcccccgggggagcggcaaggattctttcgcgctcttcctgcatcagaaggatacaaggaaaaacaggcccatggtaatcattgactgcaggtttgccgaaggaagagaatgggaatatctgatcaaccacgaggattcccctttattttcggccggatatacgatttttatcaaggatatccatcaccttaataaagagcagctggaacagctgttcctcttaatctgcaatacagcgctgaataaaagaaatcaactggtattttcttatgttcccggaatttcctcatcctttgaaaaaagtgatcttaaaaatgagatcatctatatccttcatgccctggttattaccatcccatctctcaataaccgcagagaggatattccaaatctggcctcgctttacttaaacgaatttaattctcagatggtgaaacaggctattgcctttgaaccggaggcattgaaggtactgcaggattttaactggactgataatctctatcagatgaagactgttatacaggaattaattatgtatgcaaaatcctctcttattacggcagaggaagccgcctatgtccttaaaaaatatgagaccgatgataatcccagccacacctccggcgggatctcactggagggaacactggatgatatcacaaaacgtattgtcaaccaggtgctccgtgaagaaaacatgaatcaatccaaagctgcaaagcggttaaatatcggacgaagtacactgagaagacatttgtaagcgcgttttcctctttctcagcaattccggccatgaagttaatattgagaatcccgataagctttccacaatactttatgatttttggttaaatccatactgaatgttggggtgtgcaaaaaagcacacttccagcatttttttgttgatggcggtgacctgtacgcggtgcatccaggttatcgttcggaataaagaacttctataaaccagtgttaacggatagttaaggttacataagaaattgcttaaaatgtaggaactttaattattcccataagaaaaaatataaaacagtcagaaaaaacagttatattaaaattaatattgttaataatgcacaaaaattgttaaatatcaaatttgacagactcataaaggagttttataatcatgattacaaatcaaacactgtttaaaaaatggctgattcagaatgcaatgagtaaccgtttttccaggtcaggatgaacgcagcagttacccaaaggaatttagccgggcagaaaggagaaggtttttatggatgagaaaaatgaaaaagagaaagtgaatgaagaaaaggaagagctattgaaggagcgggtatttttctattttgcccagctctgccggatcccgcgtcaaagcggcaatgaaaaagcggtcagcgactttatcttaaattgggcgcttgatcaggggcttaaggcaaagcaggacgcggtcaacaatgtctttatccgtaaagcggcatccgccgggtacgaagccgcgcctccagtcatgcttcaggcgcatatggacatggtctgtgaaaagaatgagggggtaaatcacgattttacaaaggatccaatcaaatggatgattgaaggagacctgatatcgacaggaggagagacaacacttggagccgacaatgggattggggttgcctgtgcaatggcggtgctggaggataaaaccctggctcatccacggcttgaggttttgtttacggtggcggaggaatctgattttacaggggcggccaattttgatacctcctggatggaatcagaccgcatgatcaatctggatcacgcttccgacaaggaaatcctgtgcgggagctgtggagggatggatgccgttatcactcttccaatcaagccggagaaactgaaaacaggatggaagacctgtactgtcaggatatacgggctgaaaggaggccattccggggaggatatccacagaggacggggcaatgccaatctcctgctcggaaggtttctcgctgcggcagaaaaacggtttgcatacgggatttcagccgccggaggaggaacctgccgtctggctataccgcgggaagcaaaggccgatatcagcctggggaggccgatattaaggaactgcaaaagctggcggaggaacagcaggagatgtttcggaacgaacttcaggcaacctcatcctctctctgcatctcagttacagaagccccggcagcagaatttcaggttgctccagagaaaattattaatttgattctgctggcgccggatgggatctgccagatgaatgaaatgcttaccggattggttgacacatcggataatatgggcgaattacatatggacagcgagtcgtttcagcttgtatttgaaatacgctcggctaaagacagcctgaaatattttgtttatgacaaaatatcgcgtttggcaaaacttctggggcgaactgtaccacgaccctggaatacggaagctggcagttcaggccccagtcaaaattccgtgacaaagccattgaggtattcaaaaagacttatggaacagagcctgccgtcctgacgcttcatgcgggactcgaggtgggatacttctttgatgcaagaccatctctggacgctatcgcgctggggccggactgctggaatttccattccccgtcggagtgcgtggggatctcttccgtcagaaggttttataagtatttatgcacacttttagccgagttgtattgagagccatatacatgggaaaggaaagcaaaatggataaagatatgaatgatttaaaagataaggaagccggtgagaaggacagagacccgggaggcttaaataaaaagccaaaattaaaggccctgaacccaatgatattccttgtagtgattatccttctgtgtgcaattgcttcctatgttgtcccggccggttcttttgcccgtgtgacgaacgcggccaccggaggggaggttgtggatccgggcagttttcaatatatggccaggactcctgtcagcgtattcgctgtgctgatgtcggtgacacagggaatgcagaatgccgcctatattattttcttcctgctgattatcggaggcacttttgcaatcatggacgcaaccggtgcaattaatgccgggatggccaatgtaatcaggaaaacaaggggcagggaacttctgatgattccaatctgcatgattatattcggatgcggctccgccttctgtggcaactttgaggaatttctggcatttgtgcctttagtgctggcatgctgttttacgatgggctttgattcccttaccgccgtcggcatcattttctgcgctgcgtcggccggatacgggggagccatgacaaatgcatttacggtcggcgtggcccagagtatagctggtcttccgcttttttcagggatagcgctaaggagcgtcctgtttgtctgtctgttgaccgtcagtattctctatgtcatgtggcatgcctacagggtaaaaaagaatccgcagtccagctccgtgtatgagtatgatatgctccatgcccatgaacatttaattgatattgattatatgcctaaggttacgacacggtgcaaactggtactcattgttttcgtaggcggtattgcctatacggtatacgggattattgtcaagaaatattatattgacgagctgtcggctatttttctcgcgataggaatactgggcggcttggtcggcggcctgaagccaagcaaaatctgtgatgaatttttaaagggctgcaccaacatgctgttcccctgtgtcatgatcggactggcaaacgccgccatagtaatactgaaaagtgcaaatattatggataccattatatatgccctctcaggtctgctgaataatcttccgccttcgattatggcctgcggcatgtttatcctgcaggatgtattaaatgttctcgtcccttccggctcaggacaggccgcagttaccatgcccctgatggcgcctctttcggatatgctgggtgtcacccgccagactgcggtgctggcgttccagatgggctccacttttaccgatgtgctggcgcccaccagcggcgaaatcctggcggcgcttgccatgtgcaaaacgccttacggaaaatggatccggtatttactgccgctgttctgcatgtggtgcctgattgccttcgcgttccttatctatgcggtgaagaccgcatacggaccattttgacggtccggcttgtcatcacagcaagtgcgcagatctgtccagcgtgtttcagatctgcgcactcggaaccagatgttcctgtccgttgcgctatatcccaagcaacttctccctgaaaagagaacaaaaaagaaagacctctctcaaagtctttcttctttttccctcgctcattttatacaagttttcactcagtcttttttcggtctgtcttatctcggattttcggtctgtcttatcgcgctgagccaggtgcttctgctttcaaagtcttaagttcatcaaatacgacatcgttcaatactttgatatacgttcccttcataccggaagaacgtgattcaattactcccgcgctctcgaatttacgcagggcattgacaatgacagaacgggtgatgcctactctgtctgcaatcttgctggcaaccaggataccctcattgccttccagttcgtcgaaaatatgtgtgattgcttccagttctgaaaatgataatgtgctgatagcggacttcacaatctgaatctttctggtctcttctgcattctcctcatttacggaacgcatcatctcaagtccaactaccgcggtgccgtattcgcttaaaataatgtcatcaatgtcataatgtgcatctgctttgtagatgaaaagcgttccaagacgctctccggaaatgtcgattggagtaatgatagcctgatacttcctgacattctcctctgcaaatcccagtgtcgcaagattgacattctctttggtggataaaacactgagaaggcgctcattcagcataccgtcgatatagccgcccacctgatctgcgatcagctcttctatctcatcaattccaggacaaattgcaacccccagtactttccccttcttgctgattacaaggatgtttgactcgagaatttcgccaagcacttcacagatgtcattaaagacaactttgtgagaatggttgttatgcaataatttgtttatttttcttgttttgtccaacaactgaacactcattaccagttacctccttcgcttaatctttgtatcgttagaaattattgctatcatgtacaaattttaacacgatttcagattaataacaagagtttttctggttttttcaatttttttaataattagggtcgctcatgaagcgttttgacaaatccacaggcctcatttgtacacaaaagcttgcttcctttttccaccatcatgctgccgcactccggacactgctctgtggacggtttttgccaggacatgaaatcacaatccggattatcctcgcatccgtagtatttacggccttttttcgtcttacggatgacaatctccttgccgcacttcgggcatttaacgccgattttttccagatatggtttggtgtttttacagtcaggaaaaccgggacaagccaggaattttccgtggggaccatatttgataacaaggtttctgccgcaaagttcacagacttcttccgtaacttcatccgcaattttgacagtatcaagttttgcatccgcttccttcacagcttccgcaagatccgggtaaaagttctcaacaacggtcttccacggtacatttccgtctccgatgctgtccagcagatattccatgttagcggtaaacgcagtgtctacaatggtcgggaaggccttcatcatcattccgttgacgacctctccaagctccgtgacatacaggttcttgttttccttcgcaacatagcgcctcgcaataatagtcgttatggtcggggcgtaagtactcggccgtcctatcccctgctcttccagggcctttacaagagatgcctccgtgtaatgggccggcggctgcgtaaaatgctggctgctgtcgagttcgatgagattcagtgccatccccttctccagcttttccgccagaacgttattctcctctttctcatcctcctgaacataaactgacataaaaccgtcgaatttcaccttggaagcggccagcgtaaagatatactctcccgccgtcacttttacggatgtagtctcatataccgccggctgcatccggctggcagtaaagcgtttccaaatcagttgatatagacggaataaatcccttgagagagattccttgacgagaacaggtgtcagggcgatgtcggtcggcctgatcgcctcatgcgcgtcctgaatcttgacatccgacttcttggccgccgcctctgccgccacatactggccgccgtactgggctttaataaattctctggccgccgtatcggcctctgccgccacacgggtggaatcggtacgcagataagtgataagacctactgtgccgtgtccctttatatccacgccctcataaagctgctgggccagacgcatcgttttctgtgtggaaaaattcagggctttggatgcctcctgctgcatggtacttgtcgtaaatggaatcggcgccttcttggtgcgctctcccagcttcacctcgcttacctcatacggctggttctccagcccgctcagtatctgatccagttcctctttgttatgaatcgccttttttccgtctgcatcgccgtagtatttggccgtgagcttcttcttagagccggggaccttaagttctgcctccagattccagtattcctccgggataaaggagttaatctcatcctccctgtcacagatcattctgagagctacggactggacgcgtcccgcactcagccctctcttaaccttagcccagagaatggggctgatcatatagcccaccatacggtccagaacccttcgcgtctgctgggcgtccaccagattcatatcaatctctctcggttcctttaaggatgccttaaccgcgttctttgttatctcattaaaactgatacggtataccttcttatcctttaattcatcgagcttcaacgcttttaccaggtgccaggaaatcgcttcgccttcgcggtccgggtcagttgccagataaattttatctgccttttttacctctttgcgaagcttcgcaagtatatcccccttacctctgatggtgatatacttcggctcataatcattctccaaatctattcccagtgtactcttaggcaaatctcttacatgtccgccagacgcgtccacctcataattcgttcccagaaattttttaattgttttcacctttgccggcgactctacaattaccaaactttttgacataacaaactcctactccaatttccttatataatattgattgacaggctgcataatgaatccgtccatttcaagtcttaaaagtgctgccatacattcccctgacggcagtttacttatttttatcagttcttctacatgtttcggttgtgaatctaagcaactatacaacattttttccgtcttggcaagcgtctttaccgattttttcatgacttttaggcaatttttacaatctattctgaaaaaatcaaggatatcttccggtgtttgtaagagtgcggctccctgcttaatcagtccgttgcatccctcgcttaacgggtcgttaacacgtccgggaacggcaaagacctctttcccctgctccagagccatatccgccgttatcagggaaccgctgcgtttcctcgcttctattacaattaccgcatcggaaagcccgctgataatccggtttctcaaaggaaaattgcgggccgccggcttctcccccggcccatattcagaaataacgcctcccgtttccagaatcgcgttataaaggctcagattctctctcgggtaacaattatcaactccgcttcccaaaacagcatatgaggccccctgtgcctttacagccccctgtggccggctccgtcaataccgctggcaagtccgctcacagtctgtatcccgttttccgccagaatcctcccgatatattccgccacctgacgtccgtagggcgtgcagcttctggcgccaataaccgccgcagtcggcaggtgttctttcggcagatcgccttttacaaaaagccacatcggcatatcatagatattctcaagacgccgcggatattccggctctccggccatgataaaacggatgccgttttttctcaattccctgtactcacggcagcgcttctcaaagagggcttttgcctcctgaatatgctctgcgtcctgtcctctcaggaagggaagtgtttccagaacctgtttcttcatattatatatttcctcaaagcttccggcatattctaaaagttttccggacttcaccgctccgattccgtctaccctgcaaagccagtagaggtattccttttctctttcgtccggcaccgatgtcccccgtttttttaatactgcttctcttttagcttccgctctcatttctgatgttctctccatatattccctctccgcgctattgttaattcacggacacgtcccttcaaaacttgaagccccagtatttcttttcaaagcttctgaatgagacggcctcccccaggtgtcccctgccgatttgtttcttctcgtccaaatccgccagggttctggctgttttcagtatcttttcacatcctctggcgctcagtccgtatgccctgaaaacatcgttcagaaaacgttcatccgattttttcaggccgcagcagttctcaatctggcgtttccccatctggctgttaaacctgcattcctcccctttgaatctctcctgctgaatctgccttgccgccatgacccgctccctcatggaagcggatgactctcccctcttttttcctgttacaaacggctgagcctgccttggtacctcaacgccaatgtcaatcctatctaaaaacgggcctgaaatacggctcagataccgcctgatttgtgtctccgtacaggtacagcggcccagatccggataaaagccgcatttacatggattcatagcggccgccaccatcgcatccgccgggaactccaccgccccgttcagccttgttacggtaatcatccgttcctccatcggctgcctcagaaggtccagaagggcggccggaaactcaggcagctcgtcgagaaacagaatgccgtgtgtagacagggatatctcccccggcctggggttcctccctcccccggcaagcgcctgggcagtgataccgtggtgcgggctcctgaacggcctggcccggataagcggctcttctttttttaacagcccgcagatactgtagattttagatacctcgatgctttcttccagcgtgataggggcattatagtcggcagcctcctggccgccattgttttgcctgtcccggcaggtccgataaacaggatgttgtgccgtccggctgccgcagcctggcaggcgcgccggaccgtaggcagtcccagcatctcatcatagtctaccggataagaaagtctgtcctcttcccggaacatcgcctcatcaaaccaatggcctgcggcttctatacgcccgctcaggatgccggccagctcgctgaggctgttaacgcctattatttcaatatcttttacggccgttccctccgccgtgttttctgaaggaacaaacatacgccgtatcccctgtcctgcggctgcgaatacacggggaagcacgcctttgaccggctttacgcagccgtccagacccagttccccgataaaagccgacttctcaagcccggcctctgacgcctccccaagacagcagagcactgccgctgcaattgccaaatcataggccgtcccttccttccttatatccccgggcgacagatttaccatcacctttttcggcggcagatgaatccccgcatttttaagagccgtcctgacgcgttcctgtgcttccctgaccgcttcggaaagaaaccccaccataataaagccgggcagtccgtcgctgacatcggcctccaccgtaaccggaaacccttccacgccgtgaaccccgaaactgttaattttactgaacaaaaataaggcctcctttatcataatttaaatgctgtgtgttggaataatgctgtgatgttcttgaaacttctgaaaatagaatattgatttgagattgacaagtctagcgttaactttgacgtttaacctatgatagctattttatcatatcaaggccgggcttgcaagaaaggaaatcagagaccgtaaccggagcagctttaacgctgctgttcactgatagcgtcatttagtcagcactgccatgaaatggagctttaactgagatttggaggacgcgtccggaaggggccatgtccggtgtggcttgtgagggacctcgctaagcaccggcggactcccatgtcccctccgcaattgattccgcctgcttccccggtccaggttttcaccggagacggaagactcaggcggaggttttctcggcaccggatatggtcccttccgggcgctgattgtctctaactttaaatagggagagccctgtcgcggccactacgtgtttttcgcagactttatcttcgcccgcagccccaaaccacggcaatcttcccccaggacgaaagactcaatatccctgtatacctcgtcccggttcagttcattgagaagttcatgcctcgcccggggatataattttatcctgacatcgctcatccccagactgcagaactctctgtagacttttttgacgcctcttcccttatcaccgaccggatcctgcgctcccgacagcaggaggaccggcagcgtctttggtatctgttcaaactgcttcttctgcacaagttcagtcatcacctgaaagaaatcctcataagctccattggaaaagataaaacagcaatccggatccgcctcgtattttctgttttccgcaatgtccctggacagccagtcatgctccgtttccccaggctcaaatggtttgttgtaacttcccagaacaagtctgtgcagcgtttcattatgataatcgcgcccttccttctttattgcccggcggaccaccattgtcccgagcttcaggacgacggccggcttgctgcctgttcccatgattatcgcaccgtccacctgctccccgcagatagtcagaaaacgccttacaaaaaaggatcccatactgtgaccgagtataaaatgaggaaccgaaggatactggcgctctgtaaaatctgatatgcgcctgatgtcttccagcacataaaaggccccgtcccggtcggaaaatgttcccaggcagccgggacgcgctgtttttccatgtcccagatgatcgtgtccaatcacggcaattccttttgcattcatcgcttctgcaaaagcgccgtaccgcccggcatgctccagcatgccatgtgatatctgtattacagcggccgcgtccgaatcaggaagccagtggatcccatggattctggaaagaccgtcgctggaaggaatataaaaatcaaatctgctgcccatactgttttctcctgtccttatatcagattcatctgtttccatttgcccttacggtatcgcaggatgaagagcgtcaggcggaatatccagtccatgatcatcgctatccagactccgattacgcccatctgaaaatggatccccagaatgacactgaacagaatcctgaataccaccattgaaaagaccgaagtcaccatcggcatcctgacgtcattcgccgcccgcagtgcgttgggaagagtgaaggccaccggccacataacgatagcgcctgcacagtggatccatacgagaattttcgtaagctccgccgtctccggggtgagggaataaatgttcagggccagcggcatgctcagaagaaccaggccgtttacaacggcaccggctatatatgcggttttcatcagtttcttcacataatattctacctgctcatagtctttagcgccgacacagcggccgaccaccgtcaccatcgccagattcagcgccatgccggatatcagtcccatattgtccaggttattcgccacggcattcgcagctatctgaaccgtcccgaatccggcgataatgctgacaatcagtacgcgtcccagttggaacagtccgttttcgattccgtttggaattcctatgtacagaatctttctgatgacagagccattcagacggcacagggagcgcagattaatgtaaattacgttcctcctgtccctcaaaagccaaaccataatcaaagcggccactccccgtgaaaaggcggttgcccatgcggcgcctgcgacccccattgaaaagccgaaaatcaggacggcattacccgccacattgatcaggttcatcaggacagatactttcattgatattttagagtttcccatggaacggaacaatgctgcgcaggaattaaaaaccgccagaaacggataggaataggccgatattctcagatatgtaaccgcattatccatgacctcccgggccaccgacggatacagcagtccgagaaaatgacgttttgtcagcaggacggccgccataattatgagagaaatcagagtcgtgacaatgaggagctggccagccgactccctgcacatatccttattccccttccccagatattgggaggacacgactgcccctcccgtggcaagagcggcaaacacattcatcagcagaaggttgatgagatctaccagtgcgacacccgaaatggcggcctcccctgcatagcttatcatcatcgtgtcggccattcccactgttatggcaagtatctgttcaattatcagcggtactatcagcagtctcaattccttgtcggaaaataaacggttcattctggttcctccggtcaattttacaatatccttattataccaaaaatccggcgggatgtcctgaaaatttatgttattgttcacagcacgccgctttttggcggggtgtgaacaataacaaatttattcctccgccgataagaaaaaagcggacagcttaacgctgcccgctttcatcatttaataattagtcgtttccgtacagagtaaccagcttagtaagatagttatatcttgcttttgcatcttcctcattcttagcgaacaatgcttttgctctctccggattcttaagcgcaagggatgtgtagcggacctcgccgtttaagaatgcctggaagtctcctgtcggagccttgctgtcaaggctgaacttcttctcagcagacggattgaagcggaagttgtgccagtaaccgcactctacagccagcttctcttctgtctgagccttgtccatacctttcttgataccgtggttgatacatggtgcataagcgataaccagagacggacccggataagcctctgcctctgccagtgcctttacagtctgtgcatagtcagcgcccatggaaatctgtgccacgtatacataaccatagctcatggcgatggaagcaagatctttcttcttcacatcttttccgcctgcagcgaactgtgcaacagcgcctgtaggtgtagccttggaggactgtccgcctgtgttggagtaaacctccgtatcgtataccataatgttgatgtctttgccggaagcaagtacatggtcaacaccgccgaagccgatatcgtaagcccatccgtcgccgccgaatacccactgggatttcttagcgaggaagtctttattcttaacgatgtccctgcatacagggcagtcaattccgtccaatgcggcaacgagcttgtctgtagcagttccgtttaatgctccgattccgaatgtgtcaagccattctttgcatgctgcttttacttcctcggaagcttctgctgatgcaaggatgtcttccactttcttctttaagccgtcgcggatagcgttctgggccaaaagcataccgtaaccgaactctgcgttatcctcgaataaggagttgtcccaagccggacccttgccttctttgttcactgtgtatggtgtggacggtgaagagttaccccaaatggaggagcatcctgtcgcattggagatatacattctgtcaccgaataactgtgtgattaattttgcataaggtgtctcgccgcagcctgcgcatgcgccggagaactcaagtaacggctgtttgaactggcttccctttacagttgtctctttgaatttctcaattacatcctgtttaatcggaagtgactggccgtaatcgaagatcttctgctctccgagactcttctcaaggctgttcataacgagggctttctcacccttcttgcccgggcagacatttgcacaggaaccgcagcctgtacagtcaagagcagatatcgtcatggcaaatttgtactgtggcattcctgtcataggaagtgtcttcattccctctgcccctgcggcctcctcctctgtaagagctacaggacggattactgcgtgcggacatacataggaacagaagttacactggatacagttatccggattccataccggaacattaactgcgataccgcgcttctcatatgcggaggaaccggatggtgtcgtaccgtcaacgtaatcaacgaaagcggataccggcaggttgttgccttcctgagcgttaacagcagcctgaaccgtattaacgaacttgacaacgtcttctcttccctctgtagcgtgagtcatctcaagaccttcgtcctctgctgtcttccagctctccggaacctgaatctctacgacattctgagcgcctgcatcgatagctgcccagttcttcttaacgacatcctcacccttacggccgtaagttgcctcagcggctgccttcatcagttcgattgctctctcctccggaataatagatgccagtttgaagaatgcggactgaaggattgtattgatacgtgtcgggcccatgccggtctcaataccaagcttcacaccatcgatggtgtagaatttgatgttgtgatctgcgatgaacttcttaacctgtcccggtaaatgtttttcaagagcttccatatcccatgggcagtttaacaggaatgttccgccgtccactaattcctgaaccatattgtacttacggatataagcaggattatggcaggctacaaagttagccttgcggattaaataggtggatttaatcggagtatgtccaaaacggaggtgggacatcgtaacgccgccggattttttggaatcatagtcaaagtatgcctgtgcatacatatccgtgttgtcaccaataatcttgatggagttcttgtttgcgcctaccgtaccgtcggctccaagaccccagaatttacagttaacggttccttccggtgtcgttacaagcggagcgcccagttccagggacagatttgtaacgtcatccacgataccgattgtgaatactttcttctctgtgttgtcataaacggctacgatctgtgccggagttgtatctttggaacctaagccgtaacgtcctgtgaagataggtgtctggtcaaactttgttccctttaacgctgcgacaacatccaggtataacggctcgcctaaagagccaggctcttttgttctgtctaatacggaaatctgttttacggaatccggaattgcttccactaatgcgctggcgcagaatggtctgtaaagacgtacctttacaacgccgacttttctgccctgggctaccaggtagtcgattgtctcttcgatagtatcgttgacagaacccatggaaatgattacatgctctgcatccggtgcgccgtagtagttgaacagcttgtaatccgtaccgatcttttcgttaaccttgtccatgtattcctggacaatcgccggtaatgcatcgtagtatgggttgcatgcctctcttacctggaagaagatgtcagggttctgagcggaacctctctggcacggatggttcgggttgagcgcgttcttgcggaatgcgtcaacggcgtccatatccaccatatctttcaggtcttcataatcccatgcctcaaccttctggatctcgtgagatgtacggaaaccgtcgaagaagttgataaatggaatctttcctttaattgcagcaaggtgggcaaccgctgtcaggtccataacttcctgtacgctggattcacagagcatggcacagcctgtctgacgacatgcataaacgtctgagtggtcaccaaaaatagataatgcatggcttgcaagtgcacgtgcagatacgttgaatacgcctggtaactgctcgcctgcaattttgtaaaggttcgggatcatcagcaacagaccctgggatgctgtataagtggttgttaaagctccggctgcaagggatccgtgaacggctcctgctgcaccagcctcagactgcatctctgtaatctgcactgtctggccgaaaatgttcgttcttccatcggttgcccactcgtctgtagcttccgccataggtgaagatggggtgataggatagatggccgctacgtcagtaaatgcataggaagcatgagctgctgcgtggttaccatccatagttttcatttttcttgccataatgaatgttcctcctgttattttaaagtgaatgtatagttgaatcccctctcggaaatttacctgagaatattataacaactttttgttaaaatgcaaacgaatttgaattgttctggcgtattattttaaaaacaataaaatttcttattattagcaccgcctttttctatcagggcccggatcaatttttcattccctgtgccgcgttctctacggttatggtcccattttccaccagcttgacaaacagctctgcaagcgtgggatcaaactgccggccggcctgtttgcgaagctcctggcaggcgtattcgaccggataagacggtttatagcttcttaccgaggtaatcgcgtcaaaggcatccgcgacggccaggcatctggctccaatcggaagctcctcgcccgtaattccccttgggtagccccgtccgtcccagcgctcatggtggcctacaacggcaggtatcaggtagtccaggctgggcaggtgccggatgattgcaatcgaatgctccacatgggttttcataataccatattcttcgtcgcttaactgtcccggctttgtgataatattctccggaattgcgatttttccgatatcgtgcagaagtcccgcttcataaatcatctgtgcatgctcttcatttagtccggccgcctttgccagggtttttgcataattcgccacattctggctgtgactgaaggtatagtgatccttcgcgtcaattgcggcggtcagagcataaatcgttgccgcatattcctcatagtttccggtcattatattgctgcgggccgtttcaatatccgaatcggcctctgcaagcgaatactggcagattctgtttttcccgctccgtttggcgttgtaaacagccatgtccgtattctccagcagttccttcacagaagacgcgctgtacggagccacgcagattccgccgctcagtgtcagggcttttaagagtacgccgcttccgtcggtctcctgccggcctacctgctgcttgatgtttttagccagctccagcgcctgatacaggttgtatccgggcatgcagatcgcaaactcttttccaccgtagcggcacgatattccgtttcttcccacggtgctgagtatgatctgcgccgtacgccttaacgcattatctccggcataggtgccgtaaagctggttaaacagtttgaaatcatccaaatccaatataataagcgctacggaatcgttccgtttatcattgtatacttcgttcagtctttccataaatgattttcggtttaaaagccccgtcagatggtctaccgtagcctcgcgctttgcctgttcatataaattggcatttttcacagctatcgcggctatcgactgtgcggactccaggaatgatatatcgtcaaaggtatattcgctccccttcatcttcctgccaatcagcacaacgcccaccagatcgccgtcgcgtttgagcggtacgatacagcttacctccagcccggacagcagccttttctccgcgtcccacatggatttgtaggtggaggaacgtttgaaatccgacataaacatacaattttcccgggtattaaaccaggtgatgcagggattgtcggaggagatggaaaatgccttctcatccaggggcgcagccgagcataccggcctgaaatgctttcccgtctgatccttcaggcagacataagccttattcacccggatagaatcgcagattacccgcaccagcagagctaaaatctcctgtaaatccaggctttgggatacagccgtgctaaattccttcagacgttcctgctgtatctgttcttccctcaaaaacaggttgtttaatattttttgcaggagctggtaaatcagcatcatggatacggcgaacaggattgctataattaatgtcgtgtaaccttcaaattccggaaaataagtctgcagcttctgctccgtcggccggatcaggtaggcacccataaccgaacaaaggcacatggtttccgccagcaccacgcctcttgacaccagaagcgtcatacggaacagcctcttacggtacatcgcataaaacatcaggcttgcgtaaataatgcccgacagcgtgtcccacggaaaatagttgcccggcaatattgaaatcagattgcctataatcagaaccggcggtccaatcatgatcggcagaaggctgcgcaccggcacgtcacgctcttttacgccataggccaccatcctggcccatggatcagcatcagtactattaaaaaggtcggaatcagaattttccagttgctctcataaagaaatacaaacctcccgtcccctgtttccaccagctccggagcctttaaaaacaattcaaaatgggtcaggatcagaatcactgccgtaaccagcagccatacctttttcatgtacttgtctctcgactccacaaaatggtacaggaacatatataccagataaggcgccgcaaagagagccagtatggacagctcataccacagcttataaccgggatacagcctgagcctcataagaagagaacagcccgtccatatggtaaaacagaaaagcagctggataaaagaattaataagtgggtttttcttggccgacaacagcgcaatcatcaaaaatgcatagcaaaaaactgccagtatcggcacccagataaaaggaatcactccgctcatcttccatacctcctgtcgccgtttatctgatacgtatcaaactttaaaaattctgaaagttcaaatgaagacggatttaccctgcgtagctttttccccgtaagttcctggtactgttccatcgtaccgcatttcagaacagttatctgcagcggttctatgcccagcatttttttcaaatcacggtaatccgtatcaaaaaatgtaaaatatacttccagatgctctttcaggatctgggtactgaccgccatccttcccaggtcggccggatttagctccacatagatatggaggtaaggacgtctttttgtgtcatattctttttttgcaatccagtgtttgattgacaggccggacagacgaatcacatcctcgatggaattttccgtaatccgggtaaagcctgcaatatcgatcacccacggcacccgatccaggaataccagttggggcagattcgtgcttttatctccaccggtgctgacacagcggaacatatccccgatcctgtagcgcgcaaatgctccgcctttcaacaccgtcacaaccagctcataattctgattggcgaccagttcatccatcaggatggtaagcggctggtaggacggatcatccatggatttatacacttcatcttccgggataaattcataaaagcaggagtccggaaaaaataccatcccgttgcgggagtgggtttccgtgcctacaatcgaaacctcggtaccggcaaatatctccagcggatcgattccccacgcctccctcagcgcatctttgtaggaagccgtatctgttcccgcacataccagtgatttcaggctgaaaagatccctgggttcgatatcacgcccttccttggcacactggtatttggctttgagaaaacggtacagcatcaggggtttcattttaaccgcctttttaagcatccctcccgatgccccgccctggaacgacgaagcgaagttctccgtaatataaaacgccacgctgctcaggccgaagaacagatcaatccccttctgcatccccagggaaaacccctttttattcctctcgccgaaggacatactgtgggcttctttcaccggaggcaggaatttgaaatcgatttcttcttcaaatactacgggaaagagccccgtaacaaacggaagcggggccaggccgaacagtaccttgtcaccattcttaagtcttgcctttttcgtctcattgctggaagataatgtagttatcgccatcagattgctgcggaaaacgtccagcatgcttctggtgtagggcgctactttgaccggatgtttgccgccctcccatgtagtctgaagccagataaccggttccccgggcagcatgtccgtcttctttgccaacaggatatccgcataatccccataagtggtaaggggaacggttctcctgaaatcctcgattgtctgcggctgtcttcctttaaggaacatctggcccagcccgctcgccgaccagacgctgatttgttcttccagcagccgcttctggatctccatatactcctcaatggataagtccagaaagctgcaatattcttcccatatttcgcggtactgctgtttttttaccttctgtccgtaattcaactttcgtctccccctttgcccgctgttttctccattctgccggtctttaaatcactgatgcattttctgatgctgtctgcatcaggtatcagatatggagtttctttcctgtagtcatcatatccctcaaacaaacgggggaatgtatatctgtcctgaagcaatatgtacagcaggttcatccctgtatataccgtgcccgccagcagcataaacggcttgccaagccccaaagacagaaacagataaaatccggccaggaacaacacccccgggtgtctgcacaatgcatatacccctgtcttacaaattttttgttttgagccctccacataagcttcctgaaaaggcacggcaaagaacagtgtgtaaaccaacagcataagctgtatccctgccagcaagaaaaaaacagcaacggcaggaaaggtgacctgataatcactctcgaattccgttactgacatagttattgtaagcacacaaagcgtaatgcagcccactgcgaacagcggcctgatacccctgtggtttttatggatttgatttaaatcatacagaataaaaaatagaaagcataagcatcccagtcctatgtaagtcattcaagcagtctccctttgtcccggttattatatcatccgcatcatcattgtaccaaatcgtttatataaactcaatataaaactgcttttctttagccgtcccacaaaacatcaaagggaaaaccttctgttacaaaggttttccctgcataaataattattgatgttaattgcttccgggccctgccggaacgtcgaccacgggattcgtaggaacaacggggctgcctccggcttcctgtcccggactgctgccgctgccatctcccggcgtcggtcctcccggtgatacggtgcccggagacggtgcctccgatgactcgccgccggggcctgccggtccctgggcatcactctggcctggaattgtctctccctcgcttaccggaactgtctcggcaatagaggcggacggatctacggtcgtgataaccacacccgatgtatttctcttaataatcgccgcttttcctctgtaactgctgttatggaagaattcacggctgatttccttgccatcctcatagattacgagataagtggtccatctgctgccgggtacggcctccttcacgaccttctcttccgtaagctgaagtgtctggtcttcctcatataccggaaccggcggatcgatggtgcttgtcttctcagaagccatgcggaccttctgaccgtcttttacgatctgcactccatagatggaaatggtcagctcctgattgacgaagttggtcttaatcgccaccggataattggaattattaacaaacttgaagtccggtccgccgaagctcacggccgcgtcttcacccggtgttacataggacggctcgtagctgtgcgcatggcgctccgtactcttaagtcctgcaaaaataacggcattatataaagtggaggaaacctggcatactccgccgcccggctcctgaaccacctctccgttcagatatgcagtggccggcttatagcctttggcctcggtacgcgctcccgtcgtttcgttaaatgagaactcctgtccgggattaatgattgtcccgttcagcgccacacaggccagcctgatattctcgttacggttgctgttggatgtcgtcttggtggtataggttgcaatcgtcttatacttctctttgagctgtgctgcagtaagctccggggaaacctctttcacgcttgcctcgattaccgcatcgtaatctttattgtgaacggcctccaccatatcggccgcaagcttgtcttggtcgatgacaagaccgtttgtgccctccgaaaacgtaaatttgcctgtttccttatcataaccggaaataccgccgttcttggccaccatgttccagttgccggctatcagggccgcctcagccttggccgcctccatcaggttctgatccgtctcatatgctttggcttcctgcatatcgcccgcataaatttcttccaggatattattcaccttttcgacaagtatattgttaaccgaagcttccttatcctggtacttcaccttcatgttccagttgtactgctttaaaattgcctctctggcctcgtcctgagtcattccggtaatatcgactccgtcgacggttatctggttttcagccgcgctggaggattcactcactgacgatgactctgcgctctctcccgtcgtacttgccttacggcatcccctcaccgcaagtgcgatgcagagtattacaataattgcaccgattccatacatcagaatctgcgtgatatcataatcattcttctttcttctcttattatggcctttgcccctgttgttaagggaactgtgcccggccgatgctcccgatactctggctccctgacgggtattccttctgctgcctccgctgcccgctcttctcgaagagcttgtatttgatgtccttcttctggaagatccgttactataatcactcataatctttcacctgtctacataatcttgtttcgttcatgctacagtatagcacaaatctatgaaaagaaaataacttatttcttaaatttctttttacgttaaaataatacttttttcttgactttttttgccgggaaatgtactgttttaccaaaacggtgaaaggtgaattttcatccgcaccaataatcaggaggtattttatggaatttattgatcttcatgtgcattcctctgcttcggacggcacgctcgcccccggcctggtaactgaactggcgctggaaaagggactgtacgcctacgctctcaccgatcacgatacaacggacggcatcgacgaagccgtgagggctgccgccggaaccggactggaggtgattcccggcacagagctttcatgtatatatgagggaaaagaaatccatataatcggcctcttcattgaccatcattcctctgagctggtaagggcgctgacgcagcttcgaaaggatcgcgataaccgcaatatggaaatgctctcccttttccaaaaagacggcttcatgattacggaggacgccctgacaaaaggcggatcgctgtccgtcatcacaagggcgcattttgcccgggcgctgatggaggccggctatgtctccacgatggagcaggcatttaaaaaatatctggagcatggcaggaaatactgtccgccaaagaaaaccgtccctcccgccgaggcaatccggctgattcttgacgccgggggctttcccgcgctggcgcatccggtccaatacaagctgggctgggaaaaaaccggcaggatgattgcaggtcttaaagagatgggacttaagggaatcgaggtctattattcgtcacatacccaaaacgacagtatgcgtctcagggaaatgtgcctccgcttccgccttctccccaccggaggctccgattttcacggttccaacaagcctgatatatccattggtaccggaagaggcgggctgcgcatctcccggcttctgctggatgatataaaaaagacgcttgcaaaagacgccgggaattagatattccccgcgtcttttttcatgcattccgccagactgtccatggtagggattaaagcagtgatgcagtccatcccgcaggcggccgccgctttcctcgtctcctccccgatacagaccgccttaaagcctctcagcatctcagcggacggcttcagcgtttccataaaccctctgactgtggaaccgcttgtgaacgtgacataatcaaagcactgtcccgtgagcagctttttcacgcgttccgtctgtgcattgcagattggataacgggtatggtaaagggcgatatcccggtactcgatcccggctttctgcaatggctttatcaattccggagagcccttctccgctctcagtatcagaatccgttctccttttgctatctccgacaagccctctcccagatccttcgcataatactgtccgggcatgtagtccggatagattccgtgtttcacgaacatttcacccgttgcccttccgattaccgcaagctttacgcccgcaagggcgcggatgtccgttttcatctctcccatcagttcaaagaagacctcggctccgctgggacttgtgaatacaagccagccataatcgccaagccgggcaagcgcttcctgtattgcgctccggtccttcggcagttcgatttccacggcaggcagttccaccacctccgcgccggcagcccgcagccgggccgtcatttgggacgctctttcgcgaggccttgtcacaagaacctttttccctgccagccctctctccccggaccaggaacagactttggccaggttacagacttcaccgaccacaataaccgccggcggccggatccccgcttccttcccgtcctcaataagcctttgaagcgttgacagcacagtcctctgacctgccgtcgtaccctcctgtaaaaaggcggccggtgtgcctcccgccatccccgcttccatgagtcctctgcagatctcaggggccgctccggcacccatcagaaaaatcagggttcccccggctctcacgagggcttcataatcaatggcgccttcattaccggcctgtgaatggccggtaatcacatgaaaagaggatgccaaaccgcggtgtgtcacagggattccgctgtatgcggggactgcaaccgccgacgtaaccccgggtacaatctcaaaggggatattattttccctaagcgcctgcgcctcctcgcctccccgtccaaagacaaagggatctccgcccttcagtctgactaccagtcctcccttctttccctcttccaccagaatccggttaatctcctcctgggaagcggaatgaaagccgcttcgttttcccacataaatctgttttgccgtgcccggtataaagcccataatcccgtcgcccgccagggcatcgtaaataacggtgtccgccgccgccagcagttcccgcccttttacggtcatcaggccggcatctcccggtcccgcgcctatcaaatacacttttttatcaaaatattgattttccacttccgtctccaatttctgtttataatctcttttactttaagtccttatttttgctcaaaagcatttttcagcgtaagcgccagcttcaccccaagctgctccgcctcctccgccatcccttccatctctcccgttatataacggtccgatgcctcgtcgtaataaaggcccctgagatacagacggccggcagctgcttcggcgcaggccgcgcagggagaactgcatccgccgtccagtattctgacaaatgcccgttctgcaagagccattgcccgggaatcgggcgcatccacctccttcataaacggaaaataatcttcttttctaccctggaccgccataattccctggcctgcagagggaatgatctcatccacagaaaaataacggctgattcttccctcaaaccccagccttataagaccggcagccgccagaatcagggcgtcatactccccgtcgtccagtttcctgagcctggtgacaagattgcccctgattcctttaaacaccgcatccggatagagcctggccgcctgcatcctccgccttctgctgaaggttccgattaccggcccggccggaaggctttcaaggcctttgcggagcacaagaacgtctcttttatcctcccgtttcgaataggccagtatcggcagccgttccggcacctccatcggcatgtccttcagactgtgaaccgttaaatcacaccggccatccaggagcgcacgatccagctcctttacaaaaagcccttttccgcctatctgctccagagacttatcaagtatcatatcccccgttgtcttcattgtcacaagctgtgccgacacgccgggacagacccgctttatctcttctattatcagttccgactgaatcactgccagaacgctctccctgcttccaatccgaatggttccgtttatcatctttctatctctcctcctgtcatttcccgctccaggcacttctgcacggcctcggtcattcgttttgccagacggtgatcggttcctccggccgtaacgcctgccacaaccggtccctgctttgccagacccgggaaatagaaatccgacatttccttttttcccgcaacattaacaaaggctccggctctccttccgtccagagccgccaggcggtcggcctccggatccccggtggccgccagaacgaggaaccagcctccctccccggcggggccggccttctctgcaagcggataacgttctctgtattccctgtaatccatcctgtacagatttacgaatccgttttccgaaagcttccgaaacagttcctccgcctggccgccgacctctctcgcaactacggtaaccgccgcgccggactctgacaaagccctgatccgtctctgcgcgaccggaccagctcccgttataagcacattatagttctttatatcaaaaaacaaaggaaagtaagacatacctccaccctttctcttcaattcgtcgtttctgtgcaaaatgcgcacgaaaacacctcgcgggatactacccgtgaacagtaacgcttccccccattatacacaaaaagccccctacattcaaatcacattttaacgcttgcggctttatccgtttcacggtatacttgtacggtatacggttatgcaaggcagtactaaatccgtcagtaaatcatggaggtaccggtatggaagaatttttcaaggctattgaggataagattggcgcatctggctatccgggacaggtgagcggtgaagaaatctataatgaaatctgcgacgacattgaggaaaaggagaacggctcctatctctttctctccaaaaaagaagataactctgtttttgagtataaagtcgacgtaatggatgataacttcaatctctcttatgttcatatcacgtcaaaatcaggcacgtttcatatagattttgacatataattcacaaacaagccgcggaagctgcctgctattttcacagacagcttcctttttttgttcctaattttgggaattatcctccttgttttatacagacacttttgttataatatgattgttaaaacattaacccattttccattcagaattaaaaggagggtttatcatgaagattcaaaatatttcagacgtaaacaaattttttgccgttattgatcagtgcaaaggaacagtcgagctggtatcaccggagggagatcgcatcaacctgaaatccaaactgacccagtacctgtccatggcaactatcttttcaaacggatatattaaagagctggaactggttgcttatgataaagatgatatcgatcgtcttatcaaattcatgtaccagggagaataagagctgtaacagttcggcttcggccagcgttacccggatacagccgtcccgcagcagattggaaaccgttaaaaccgtttctcatccgccgcgggacggctgtctttatattctcccggattaccgccgtttcagcctccggttcacatcctcccttaccagtgcataaaccactgaacagagcgggataaatatcagcattcccacgactcccatcatactgccgccgatggagacggccgccagtacccagatcgaaggaagacccactgagtttcccaccacatggggataaatcaggtttccctctatctgctgaagcacaaagaaaacaatcgtaaaccagacagcctgtacagggttcaccaccagggtcaggaaaattccgattgcacagccgataaacgcgccgaaaatcggtatcagcgctgtaaatgcaatcagcactccgattaaaagcgagtaaggcagtctgagcaggctgagcgtgataaagaacattgttcccagtatcaccgcctccgtacactggcctgcaaggaacttcgaaaaggtctgctccgccatgcggcagatgcggataaattcatttaccgcgcgctccggaaaataagcataaaacagttttttaaactgacgggccagattttccttctgcaaaaggatataaattgcaaaaataaaagcaattccaaatgtggcaattccgctggcaattgacattgccgccgtcaatgtggacgacagcaccgtgcctgctccggtcgtgacaaatccggctatcttctcaaacgtatctttccagtcaatctgcagattgatattgttgatatattccacaatctcagggtactcgccaaatttcttttcaagcattacctggacattcataaaaaactgcggaatcaaatcctttaagcttacaagcgtatcggttatctgaggcactaccaggaaaaatacgattcccagaatcagtattacaaagagaagtgcaaccgtcaggcttatcactctcctgtgctttctcactctcttctccggaagcctcgtctcaacgaaccgcatcggcacattcaggatgaaagcaatggccgaaccgcataggaacggaaatacaagccgtatgatccagcctataaataccagtactctttcaaactgcatggcaagcgccagcactatgaccgtgtacaggattaacagcataatttttttcattgtttcccggtttatatccattctgtttcctttcaaaatatctcttcaaatacatttctgatttcttcttccgatgccttaaatgttccctgaatcatctgagcgcttccgccgccccgcccgttaagctttccgttcagggtctttccggcctgcctcatatcaaatgagcggctgcccgcacagtaattaaaaccgcctttcgcatcctctgagaaaacggctgccgtctctgccttaccgccttcaagcagccggtcgcagaactgccttatctgcagcgccgtcatccctgtttcaaatacaagaagcagcttttggcctgcctcatactgttttaccttcaggttgagcagctctctcgtaagcgctccgatgcgtgcgtctttttcggccgcttcgtttttcagacgctctaccgcttcctttagcctgtctggttttgcagacagcaggtttgagatggctgcggtctgatccgtcttccttctgtaatcttccatggccttagcgccgcagagcatggatatacgcacgccgcccttataatgaatcatggacaggaacttaaccgctccgatttcaccggtatattcaacgtgggtcccgcagcaggcacagcagtcggcgccgggaacttccacgattctgacccggccgctcagttccttcttacttctgtaatccagcttttgcagttcctcctccgatgggtatgtagcctttatctgcctgttggcaaaaacgatttcgttcgcttctttttctatttccatcagttcttcccaggtcagtattccatttaaatctatcgtcatttcttcatggcccatgtggaatccgacattatcatacccgtaacggccgtggattaatcccgatacaatatgttccccgaatgctgctgcatattagaaaaacggctatcccagtctatcgcaccggtgacggtttgtccctcctgcagttcctgatccgtgtagtggattacctcctctcccctctcatggacatccagtactctggctgttccaagcgttcccgtatcagacggctggcctcccccttccgggtaaaaggcagtccggtccagtatcacttcaaatccctttttccctttttcacaggagacaacctttgcctcaaactgcctgatatagggaatacggtaatacagcttttccatctttatttcctttctttatcaaattccgcgatactcctattatacacaagttttcaccatgttcaatcatgttcccgttaaaattaattttaaaaatcaggaaactgtggcaagccgccgggcatatgatggagtgtaaagaaaatctcggaggaacttaatatgagtgatttagcagcaacaaactgcggatgtggatgtgagaatacctgtggcggcggatgtggatgcggatgcggatgtggcggaggaaactcgattttcctgattctcatcttactctgctgctgtggcggcggcttcggcggcggcggtggatgttgtgaacataactgcggcggcggatgcggatgcggcggtggattcggcggcggatgtgactgcctgatctggattatcctgctgtgctgctgctgtggcggcggcggattcggtggcggcggcggattctgctgctaatacatctgtcccttcaggccccggattgcctcagaattcaaagcggagttcttccgcagcaatccgttcggccggtattctgaaaaactgccgggatttcccggcagtttctttcgttgcaggcgatgacctgtgcgcagagcgtgcagattatcgttttctcactgttctctgtttatctgataaatcagggcattacagacagcggccgcaacattgcttcccccttttcttcccctggccactatataaggcgtatccttcaatgacagaatcagttcttttgactggacaacattgacaaagccgaccggtacgccgataatcagcttcggcctaagccttccttcctgaatcagctcatagagcctgacaagggccgtcggtgcgttacccacagcaaaaatacagtcgcgccccagtcccgccgccttctccatactggctgccgcccttgttgtcccgtcgctctttgccttcccggccacgtcctcatcggccataaagcagaggacttccccgcccattttatggagggactttttgttcactccggcttttcccatatttgtatcggtcacaatggtacagccctctcttaacgcctcaagcgctttttccacggcgccgtctgaaaatatgagactgtccgcataatcaaaatcagcggtggtatggatcacgcgtttcaccacctgctcctgcccggccggaaaggtcctgtctcccagctcttttgttataatctccaggctccgtctctcaatctcctccggcagcacctgctccagttctatcatcgcaaaccatcctccaatattctgtagactgcctccatgtcgaggctcgttcgaagctcctgcgccagcttgtcgtactggctctcccggtaagcatgataatcaaagtctccgttctccgtctttaagccggaaatccccttcgcttccagaagagcttctgtaactgcggctgcaactcccggaccgtcaaagattccgtgtacataggtaccatagatatttccgcaggccgttccgtctcttttaccggcgccggcaccgttctggtactctgtcagtgaaagaagggaggccccgtttacccttatctgcgtcttacccatgtggatttcatacccctccgtcttcattccggacaggtttttgaagatacccggcaccgcctcaaaacggcccgtaatcctggtcctcgtcttttcctcgtgaaaagacgttaccgcaccaatcaggcccatcccggccgcctgctgtcccggaatgccgttttccgtacctgcttcatccaccaggctctcccccatcatctggtatccgccgcagattccccagatcggtgttcccttcgcggccgctttaaggatcaatgcctccaggccgttctggcgcatccacagtaaatctcccatcgtgttctttgtgccgggaaggataatcatatccggtctgccaagctccgaagaccggcttacgtaccgtaccgatgcccccttcatcgccgacagcacatgaaagtccgtaaaattggacagtctcggaaaacgtatcaccgcgatatcggcaaaaacaccgtgttcctgccgttccccggggaaaatggccgtcagcctgctgctcaggctgtcctcatcctcgatatccacatccatgtacggcgtcactcctacgaccggaatcctgcataagtcctctatcatttccacacccggatcaaggattgacttatctccgcggaatttattgattatcaggcccttaaccatcttcctctcctccggctccagaagcatcacagtgccgtatagctgggcgaaaacaccgccccggtcaatatcgccggccagaagcaccggcgcctttgccatcctggccattcccatgttgacgatatcatcactcttcagattgatctccgccggacttccggccccttcaatcacgattatatcgtatttacggtcaagacgcccgtatgcctccatgatggaaggtaccaggctctttttatagcggaagtaatccctggctgccatggttgcaaccggaacgccgcttacaatcacctgggaaccggtatcactggacggctttaagagaatgggattcatgtccaccgaggggctgaccttcgcggcctgggcctgcaccacctgggcgcggcccatctcaagcccctcccgcgtgatgaacgaattaagcgccatattctgggacttaaaaggagccaccctatagccgtcctggcaaaagattctgcacagtccggcggccagcaggcttttccccgcatttgacatggttccctgtatcataattgcctttgccattatccctttcctcctgctgccttcatgcattcaagcagcgctttgttctcctcgtgcagtctgacggagacccggtaataccgtttatccagtccgtcaaagttttcacaggaacggattaaaatccccctgtccctgcaaaattccttatagtcaaaacagttcccagacttaaaaaggatataatttaccattgagggaaacacggtaaatcccatacgctcaaggccgtcagccagaaactgtctctcccgctccaccgcagccaccgtcctgtcaatccacctgccgttcacggcagcctccctcacggcagccagagcggcagcctcggccggcgccgatacgctccagggctggcggcagcattccatccgttccaaaatcatctgctccgtacagagggcatagccgaaccgaagtcctgccatggcatatacttttgtaaatgcattgacagccatgacatgcccgtattcctccggccgtttctttatcagtggaatcacggaaaactttgccctgtcttttaaaaaccagttaaagcattcatcgaccacgagaaaaatccctttttccctgcacagaccggccagtctgtcaatccagccgttgtccgccgccattccggtcgggttccccggattgccgataatcaccatatcggtgccggagctgtccgcaacgcggcttaaaaaatcccgctccccgccatccagtgcaaatccgtactcttctcccgggtaaaaccgttctgttttacagccggcggccgagagggccgtctcgtattccgcaaaggacggagaagggacaagggccttacccggccgcagggcaaagaccagcgtataaaaaaggtcggatgctccgttgccgcatatcagatgctccggcttaatcccgtccccgtaatattttgccagagactgcctgatggtccgggacaggctgtcgggataccgctcccagctttgctccgaagcggcggcagcttttttaaccgcttccggcatgccgaagggattcgtatttaccgaaaaatccagtctgattttattgtccgtatagatgtctcccccatgcagatattccacttcgccgtccctccatatcctcgtaaactatcaaatccacattcctgccaaagcctgccagataagcgcaagtatcagcgcgaaaactgccgccgcatacatcagccggttcgcccttctgatgtcctcatattccacagggcgcagcgcatcaccgataaatggttttttacacagctccccgaaataccaggcatcgcctgctagcctgatatccagcgccccggcgcagacggattccgtctgtgccgaattcggactcttatggttaaagcggtctcttttaaatatgcggcaggcatttctataatctaaccggcacaccgccgccgctgctatcataagcagggcggacaggcgggagggaagaaaattcgccgcatcgtcaagcctggccgcggcccggccaaaccagaaatattttttgttcttatatcctgccatggaatccattgtattaaccgccttatagacccagcccagaacaggtcctcccaacgccagataaaaaagaggggcaatcaccccgtcggaggcattctcagccactgtctccacggcagccctggctatgccctgtgcgtcaagcacactggtgtcacggcctacgatcatggagacattccttctcgcttcctcaacatccccattccttaaagagtaatagactcccatgctctcatccctcagggaacgggccgccaaaagaaaataaaccataactgattccgccagaaacaacgccgtgttcccggccgccgcagccgcataccataaaccaaacgacaatgcggccgtaattccaagcaccagcagaacgaagagcgccccccggccagttctcccttttccgttttagggaacaggcggcggattcctttttccgaaaggcttatcagattcccgatgcctctcaccggatggggaaggaaatggggatccccaaagcaggcatccagaataaatcccgccaatgtcgacgccatatgaatctttacactgtccatgatttatctccaatgctgttttacgttttataatggtacggtttacacggctgcgttccgcgaagcgcgttattgttcgcagcgcaccgcattttgtcgggacgtgaacaataactatttaatcctgcttcccagtccgcatacgacgcggtagacctcatccgaaaaagcggcgattttctggcagacacggccgtccttctccctgtattcccgcgcaaatgcgtcagccggaacgattccgcagccgatttcatcggccaccaccacggccccgccgttcttttctatcagctccccagcaaatacggccggatctgtcccttcctgcattaaccgcaggacataacattccagatggagaatcagctcagcctccagagcttccccgtagccggaacagcgcccgtcggcggcggctatgtccttatcctgaaagaagctgtaggcaaactccgtctttccctgggcctgtccgcctgtaataaatatcatatcacgactcttcctttccgaacttctctctgtttttccgtcattcatgcagctccaggggcagtccgtcgggatctttgaaaaatgtcatctttttattcgtaaattcgtccacccggaccggctccgtctcaatgccggcggcatttaatgcttctaccgcttcctccatggaatccaccttaaaagccagatggcgcaggccgcaggcctccggataattcagccgggcaggactgcccggtattccgaaaatttccagctcgcagtcccccagctttaaatccagtttataatcgcccctctgttccctgtaattctccctgataatttcaaagccaagcttattaacgtaaaaatcccgggatttctgataatcagatactataattgcaacatggtgaatcgtattcaaacgaatcataatcgttatctcctttcctggccgccaacgataaccggcacgctccgcgcatcgatcaccgtcttccgtcagcgcagtcccgccaggcggcaggctgccattgcaatgataagtgccagttcaaatatctgcagaaaataaccggccagatctccggtcattccgccaaactcttttaccgtcattctgtagtaataacagaaaaccataaccgcagtaacaatgcagataatcccgctaattgcccctgcctgcataatccccgcagcggctgcggccagatatgcagccataatgaattgaaccgtcttcgtcttggcttttcccgaaaattcggcggccagaccgtctttcttcgcctttgggaaactgactaccgacaggccgctgagcgctctttccgccacgaacacgtatgacagcaggcagatatccgaaaattccagctccgagaatgcggctccgtaaagaagcaggtatactccgagtccgattatggcaaatgcccctgtatgcggatcttttaagatttccagtttcttttcccgggaaccgtaggagcttcttgcgtccgtcacatcgagaaagccgtccatgtgtattcctccggtaaccagaagcggtacggcggcgcctcccagcgccatgaacaattctccggctcccagcctcttcgccagccagataaacaaaaccaggactgcgcctgttatcaatccaatcagcggaaaaaaacacatggcatatttcatacgttcctttgtccactccacctgcggcaccggtattttcgaatacatggacagcgctatcaaaaagcttccaagcagattcattttctcatttcccttccctgccccttaatacggatcggaatgccgtatactacctccgttaccgtatccgccatctgtcccaggcggcagttgatttcgccaagcaggcggatataacgcatggtttccgccccgtaatccatcccatcgcaaaagacttcattcgtcacaatcaccagttcccggcattggcggcgaagatgctccactccctccaaaatattgttcagggcatttttctcattccggtaaaattcattcgatgccagatttgacatacactccaaaagaaccgaggtattttctccggcctgcggcaaggccttttcccgcactgcggcggccaaagccattttttcgccgatggacagcttatcgccagtggactgcttatcacaggtggatagttcgagggaggataggccggtataatgttcgatggttataaatcccttcccgctgcgcatttcccggtgccgtctgacacgtttccggccctcatcgtcccataccatcatcgttgccacataaatccggcggtgtaatgcgctctccgctatcagcttctccgcatattccgattttccgcttccgcttccgcctgtcacaacatgcagcatatgtatctcccatctttttcctgtattgtccacagacctgcaaaaggcgcagctctgcaaacagaaacctttagctgatttgctaaataaattcggcgttagagaggcttgtactcatcaatctcaatgtcttcaaaagtactcatcctttcatagaccgccagcgtcatatccagcagaggaaacagggcgaccgccccggtgccttccccaaggcacattccagcttcgatggccggttttttcccaagaaaatccagcattttcctgcctgccggttccgccgacacatgggcggccagcatatatccgcctgccgtctcatcaattgccacagcggctgcggctgcggctgccgagataaagccgtcgattacaaccggaatacggaagatggctccgccaagaaatactcctgccagtcctgccagatcgaaaccgccgaccttagataaaacatccaggccatccgatggatccggcttgtggagttcaatccctctcttgatcgttcggattttctgctgaagccccgaatcgctcagcccggcaccttttccggtcacagcggcgggatccagtcccagcaggacggacgccaccgcgctgctcgtcgtggtattgccgatccccatctcaccggttgcaattatctgataccccttattcttcaattctccggccagctcaattccggccaggacggcaagaaccgcttccctcctggtcatggcggttgtctttataaaattatcggtaccttttctgattttacggtcaatcagaggatgtacggttcccgtctttcccagttcacaggccaccccgatatccaccggatacacatccgctcctgctttttcagccatcaggcaggcacagctttccccctttgtaaaattagaggtgaccgccgccgtaacctcctgccccgtctgggtaacgccttcctctacgacgccattatcggcacagaaaataatcaacgcctttttatcaagctttacagccgcagaacccgtcatcccggctattttaataatgtcttcctcgagaactccaaggctgcctagaggttttgctattttactaaagcggaatgccgacgcccgttccgcttccttatcagccggaacaagcctcccgcactgttcttccagaagggcggacagctgtccctccgtccagtcccggtatgtctcccactgaatttctgctttcctgcccggctccctgccaaggctgcgtcttgccactaacgtcattctaatccctttcagtccgcctattatctcactctgtatacagctttcattgttgctttcattgttatatctacatttaaaacagaaccattatatcaaaatccggtcgttttgaccatacataaatgcggatgtttcattgatgatgggaggacacatccaaaacggagcggggatggtgttaaacaatcgtattggcagcgcgaatcagcaaggcgagacttcgccctccattctgaatatcacaaaaatgcatcatcaaaactatcccgccctgcgcaacacggagctgtccgcttaatgtccattcattcttaaggcatgtcaggttgccgtcatttgtaaaacagaactgtttgtcaatcttttgcataagctagtttaagacaatgtgtaacggatatcttgcagatatattccgcaaaacacatcaaatctatgggaaaggaccgaattaatatgaaaatatacaatgatgctgacagttataaggataagaatttatgcaattgttgttgtgatttctgcggtggatgtaattgccgccactgctgccaaggaccgcaaggtccacagggtgaaccaggaccgcagggtgtacagggagcacccggtccgcaggggccggctggacctcagggcttacagggcgaaaccggaccgcaggggcccgctgggcctcagggcgaaaccgggccgcaggggcccgctggacctcagggtttacaaggggagcccgggccgcagggattacagggtgaaatcggaccgcaggggcccgctgggcctcagggtttacagggcgaaaccgggccgcaggggcctgctgggccgcagggttttcaaggcgaaaccgggccgcagggactacaaggcgaaccgggacctcagggcttacagggtgaaaccgggcctcagggcctgcaaggcgaaccgggacctcagggactacagggtgaaaccgggcctcagggcctgcaaggcgaaccgggacctcaaggactacagggcgaaaccggaccgcaggggcccgctgggcctcagggtatgcaaggcgaaccgggacctcagggcttacagggtgaaaccggaccacaggggcccgctgggcctcaaggcttgcagggcgaaaccgggccgcaaggacccgccgggcctcaaggactacaaggcgaaccggggcctcagggcttacagggcgaaaccggaccgcagggaccctctgggcctcagggattacagggagagcccggaccgcagggtatacaaggtgaaaccggtccacaagggcccgccggacctcagggtatacaaggagagcccggaccgcagggcacatttgagccaggtgatattctattttatgttaatggtaacgggggaccgatccccatcagatttggtgaagatttgaattttatatctcccaatttggatattttcctaagcgataatccagcaaccgtaaatattaatgacgtcaaagtggctgacgctgccttcggcggactctattccaacattgcccagtcatttaatctttctgccatcgggcaggttgaacagctgcaacagaataataacatgccctcattcaatatcgggcaaagccaaaatgaactgcagatcttccttccgggcgaatatgaaataaactttatgattcgtattgccccggttgcaactccgggacagacaatttctgcaggcgtgcgtcagaacggaagctttattgagtccaccatgcagtttagcacgctttctacaacaaattataccgtcttgcagggaagcgtcattgaatttttaagcgggcagatagatttggcgtttctgtccaccggagcagcaacgtttgagctgggaatgcttactaatgctacactgacagtggaacggctcacaccattcccgtaagaaaagaagcggcctgggcgtttaatgtccgctaactatggtctgccaaaccaatcaggccgcttatccccaaaacaggtgacagattaatccgataggaaacccatcgccgcttctgcaaaacgtgagaaatcacattttcgttgaagcggcggtggtacggtaacgcagcctgatggtttaactgtatacattacttggcgaaagacccagcagcgtacccgcctatttattgatgccgacgacctgtgcgcggagcgtacaggttatcgtttactcaattctcacagaactcatcaccggcatttccaccggcctattccacgtttcggccccatgtgtcggaagcgcggctatctgatccagaacatcaaacccggacaccatctgcccgaaggctgcgtaacggccgtccagcttgtgcgcatcctggtgcacaacaaagaactgtgttcccgccgtgttataaccgtcgtcgcgggccatggaaatggctccccttatatgaggaattgggtttgatactccgttttcctcaaactcccctttaatatgccagtcgctgtccgtcatgatatcattgtccggggaacctgcctgaattacgtaatctttcacaatccggcaccaggccagaccgtcatagaaaccgcttttcgccgtatcctcaaagttctttactgtaagaggtgcatgctccggatataattcaaataccatctcaccgaagccctctgttgtaataatacatctcatcattttccctcctgctagaacatgtttgaaaactgctttccgtcagatgtgcgtcacactttgtgggagattgttccccgaagtgggacgtgcagatggcgggaatgaattttcaaacacgctccactcccgcttttatcaccttttccgccatccggcaaaagacagttttgtgaacctttttcctgtccgtcaatcaaagaaatgcgcagcgtctgcaaccgattttcatcactgctgcagacgctgcgcaatctattattgttgcctgacgttaatttttattttgccattacctttgcatttttaaagtaaaggttagaggaagatgtcatatatacacccttgatataatcctttaccagatagttattagatttatagtataatggcaatactgcatactcagatgatgcgatattatcggcctgtttaacaagttcaccgaatttgaccggatccttttcaactttaatctgatcaacaatcgcatcatactctttgttgctgtaatttccgttattcgtcacgtcatctgtatacattaatggaaggaagctcatagggttaacatagtctgcgctccagcccattgctgctacttcatagttgcctgactgaacatcgctgtagaatactgcccagtcagcggaacttacttccaccttaatgccgagattctgctctaacatttccttgattgcctcagcaatcttctttacattatcatcagaatagaaagaaagctgtaaagttgggaacccctcaccatcaggatatcctgcttctgccagcactttctttgcctcttcaggactagcagtggaggacaggccaaaatctgaacgtccgtctgtcaaatctttaccgtcaaccacgtaaccaggagcgtaaaaactatatgctggaactgcatccaactgtgctacattattaataagagcatcacgatcaattgccagacatagcgcttttcttactaacggattattataaggctctttttcacagtttatattataataaacagttccataacttggcgctgtgacaagtcccgcattttcagctttcagccttgccatatcgccggacggtactgttctgacaccatccacctcattattttcataagcagtgagagcagttgatgtgtcaagtatataacgatatgttaatttctcaagcgttacatttccagcatcccagtaattttcatttttctcaagtataaaactctctcccatgttcatctgggtaatcttaaatggtccattgcaaacatatgtttctgctgaattggtccacttatcgccgtttgcttctaccgtagctttctgaaccgggaagtatacccacatgcttactaaatcaacaaagtatgggcatggagcttttaaagtatactgaattgtcttttcgtccagcgcctttactcccacatcttcagctgaagctgttccggcataatattcttctgcatttacaacatagtcggaaatcatgttaagatactgtgcagtcgtcgatggtgtcaaaacacggagtgcagaatatacatagtcatctgctgttaaatcactaccgtcactccattttaatccgtcccttaaatggaaggtaaattcggtaagatcatcattcgactcccaagattctgcattacccggtactacctctcctttttcattataggtcacaaggccttcaaaacaatttaccagaaatggcgttgcaaacgagttgttcgtaattgtcggatcgattccgtccggctcattgttaagtacaaacgtcatctcctgaacatcggccagagtatctgccgcctctgccccctccgtggatgcctcgcttcctgccgcctccgtcgtcgcatcagcgattgtctgaggctctgtgggcgtactgccgccgccgcagcctgaaagcacggtagtgcatacaaggccgagggctaaaagcagacttactttctttttcataatatttctcctcctttttggatttttatgtttcaggcgcacagagtatctgttgttactattcacggccctgctgaaaaacgcattttcgcgccgtacaactcgggattttcatgcaaaatgcgcacgaaaacacctcgcggaatacaggccatgaatagtaactatatgttgcctctgcgccgaaaaacctgttggtgcggtgcagcctcacctccggtcagtacagatgacaggccaccatatggccgttcccgcgtctttcatctgcgggaccgcctcgctgcaggccggtttcgcataaggacatctggtatggaaacggcagccggagggaggctttatcgggcttggaatatctccctcaatactgctcttttccttcatcttcgccagcttcggattggctatcggaatgctccccagcaggccttttgtataggggtgcagcggatttttataaatctcgccggcttcacatacctctaccagctgccccaggtacataactcccacatcatcggatacatagcgcaccatcgataaatcatgggcaataaacaggtaggatacccctttttcctcctggaaatctttcaggagattgatgacctgggcctggattgacacgtccagcgcggaaatcggttcatcgcagataaccagctccggctgcaatatcagtgccctggctatgccgacacgctgtctctgtccgcctgaaaactcatgtgcataacggttggcgtgttccttggtaagtcccacccgctccagcatcggatatacaagctcattcgactgatccttccttttcacaacattatgtgccaccagaggctccgctatgatgtcgcgcaccgtcattctggcgttcagggaagcgtaagggtcctgaaaaatcatctgcatcttttttctgtatggtttgagctgtttctggctcaaattcgttatatcatccccgtccagaatgatctgtccggaggtgggatcgtacattctgataatcgttctggcacagcttgactttccgcagcccgactcgccgacaagccccagcgtcctgccctttttgagcgtcaggctcacatcgtccacggcatgcaccacctgcctgccgcctgctttaaaatgttttgtgaggtttctgacctccagtatattctgctcactcatggcttgctccttagtttaaatggattattttcatcggccggtgcatccggggataaaaggaaacatctggaataatgtccctctcccactgcgctgaattccggcaactccactgcgcacacgctcctcgcataaggacagcgcggtgcaaaaggacagcccttcggcggattcgtcatatccggaggtgaaccgggtatcggacttaaccgcacctctttgttctgttcaatatcaggtatcgaagccagcagccccatcgtatacggatggctgggatgctcaaaaatatcttcaatcggcgcttcctccattacaaggccgccgtacataacaataacacggtcgcacagctccgccacaacgcccaggtcatgggtaatgaaaataatgctggtgccgtactccttttcaagctcccgcaactggcgcaggatctgatcctggatcgtcacgtccagggcggtggtcggctcatctgcgatcagaagctccggcttgttggcaagggccatcgcgatcatgacacgctgacgcataccgcctgaaaattcatgaggaaatgagtggtaccgtttttccggttccggtatacggactctggagaaaagctccatcacctcttttttcagttcctccctgctcttgtcgggatgatgttcccggatcatctccgacacctgttttcccaccggaatcagcggattcaatgaggacatcggatcctgaaaaatcatggcaatcttctctcccctgattttccggatttgttttttggacagcttcgtcaggtcctcccctcaaacaggatggagccgtccttaattctggccgtatctgccaaaagacggagtatggacatggaggtaacgctttttccgctaccggactctcccacgattccgagaatctccccttccccacagagaagctgactccgcggacggcctgaacttcaccgccgctggtcataaacgaagtcttcaaattttctatttttaatatcggttccatgttctcactccttactttttcagtttcgggtccagcgcatccctcaggccgtcgcctacaaagttgaaggcaaacatgataatacagatgacaagggccggaataaataactggtgcggacaggaacgaagattttccgtcgcgtcgttgcacatggttccaaggctggctaacggcggtttcaggccgatacccagatagcttaagaatgcctccatgaagatggcggacggaatcagcattgtaaccgttaccagaatggagcccatggcattgggaatcaaatgttcaaacaaaatcgttttcgtggatgagccgatggttttggccgccaggacaaattcctgctccttgaggcttaacacctgcccccggaccaccctggccatatcgacccagtacacggttcccagggcaatgatgatactctggattccctggcccagaaggaccataatcaggatgacatacagtgtaagcggaatcgtgctgataatatccacaatacgcatcattaccgtatccaccattcctcccgcatatcctgatataccgccgaagagtattccaatcaccatattgacggctgccgccacaaaggccaccatcagagatactcttgtgccgtacatcagtcgggtcaggatatcccgtcccaggttatccgtgccaagcacataggatttgttccagattttagcagtcggatagattgtcttcgtctccggattggcaataacataaggtttctgcccgtaatacaggcctatctcagtgccgttgcagtcataaatcgtcattgaccggtccgactcttcccggaccttcttaagctgtacgccgagcttgccgtccttatctacctggagtaccttcagcgcctgcgtgatgtagagatatccggaattatccggtgtctcaaacaccttcatataaggaggaatattcactacctccagattctgggtggaataactgtatttcgtaaacatcggtcctgcaattgcaaaaaacagcaggaacagaataatgataaagcctgcgatagcggttggtttcctgtggaagcggtaccacacatctccggcaaatgttctgtttttagtccaaattttctcgcggtcctcattggaggactcaagcatttcccatttattatccattacacatccccgtccttattcgaatttgattcttgggtcaatcagacagtagaaaatatccacgatgaaaatcatcgccatcaaaaatgtggcgtagaaaatggtaacgcccatgatcgtggtataatctctcacctgcacgctgttgacaaaatgaactcccaggccagggatagcaaaaatcttctcaattacaaagctgcctgtcatcaggtttgccacagtgggtcccagtacggtgataaccgggatcagcgcattcctcatggcgtgtttcagaacgaccttcgtctccgaaagccctttcgccctggcggtgcggatataatcctgtcccattacttccaggagactggaacgcatcagccgcgccatatagcttaaagaatatcctcccagagcgataacggggagaatatatcccttccaggtatcgactccgtaggtcgggagcagattcagccggaaggaaaatatgtatatcagaacggaagcaatgacaaaagaaggtattgtaacgccgattgtggcgactgccatcagaaccatatcctgccacttcccgttcttcactgccgccaggattcccatcgggacagcggccagcaggacaaaaacaatcgtgatgcatccaagctttgccgataccgggaaaccgttggtaatataatcacttacctgtttgccggtatacttataggaaggtcctaagtcaccatgcagtatgttgcctaaataatcaaaaaactgttccggcagcggtttatccagattatatttttcattcagtgcctgaagcacctcctccgatacctgacggtcgctggtaaacggcccgccgggtacggcgtgcataatggcaaaggtcagaagcactatcagaaagagcgcaatcagcatcattccaagccgttttaaaaaatatcgtaccatatcattccctcacatctgtcttttcttacggtttcttatctgtccgcctttaatctccatatggcgttcaaatgtctctgctggaaacacaaaaaccgttatttatggtcgattataagccttagtggcgcttcttgtcaattggtttctcacatcaccagtttaaagtggggatttagttaagctggtgaggacgctgccggaacggacggcggacggggtgtggagtgggtatatgagtctttcgtcccggcgaaaaactatccttggggcggaggggaatatagaatctgcggatgccgttggaatccatcggtgcttgacgaggtgttttcgagtctagcagccgctatgcattccacagagtgggaacatgctccgcagactctatattccccgcagccccagcccacgatgcacttcccccggaacgaaagactcataaaacctccccaccaccccgtccgctggccgtaccggcggcgtcctcacctgcttaattaaattcctcgaataatgcccccacagcatcaagataagccactgcattctgagctttttttattttctttatatacttctccttttttccctcaccgccgtcatcgaagagcccggccatataaaaccataattccttcatcttaaagagagtatttctgtctcccgacattatctcctgatagccgtagaagatctggtcatggaaggcccttaacgtggctttatccggctttgaacgctcctttatcccttttacttcggcgaaaagccacggattggcaacggctcccctgcctaacataatacttttaagcattggaaattcatcttccggaaagtctgaccggaagcgggcgcattcttcctttgtaaagatgtccccattataacagaccggattattgctgcccctcactccgcggcaaaacacctcccgttccggtttattggcataaaaatcactgcggaccctgggatgtatgatcaattctttcagagggtaccggttatagatttttaaaagctcttcaaattcatcgtggctttccataccggttcttgttttcacggaaacctggacagcttccgtttccagcccggaaaatacctgctccaaaaaacgatccagttcatttggaacggacaggaaaccggcccccttattttttgcggtcacagtggcggagggacagcccagattcaggttaacttcccggtagccatagctgctgagttccttggccgcccagataaaatcctccgctttatttgtcaggatctgcggaaccagggatatcccggcattatgtccgggaaggatatcatttttctcccgggaactcagcttatgattctgggcaggcgagagaaagggcgtaaagtattgatctgcgcccggaaaaaatcggtgatgggcattccggtagacatatccggttatcccctccatcggtgcaaaatagtatttcatatcgtctttttcctccataacctgcactgttccagccaccattccgtaaaagacggagcagacagataataaaaatgcggaaagccgcagatccggggtccatcctggtggatacagtgccagctcctgtcggacgccggtttctcagccagccagtcctcccccggatcaccgctctcccagtagtgaaattcatggcctttaattttcattccgccaggccctgtcagactgatatagccgaaccggccgagtcttcccgtattaaatgccttttgcttgtaaattccagccattttataaacgctgccgtcactgccctcgagcatctcatgtaaatataaaaaacctccgcactctgccagaacaggcataccggccagccaggcctcacggatggattgaagcatttcttcattagaagaaagcttctctgcataattctcaggataacctccgccaagtatcaagccgtccaggccctttggcagattcctatcgtgaatgggactgaagcagacaagctccgccccctgctcttttaaaagctccagattctcatggtaatagaagcagaaggcttcgtcccgggcaatgcctatccttactttttcttccgtatgtgctgaaaaaaatgcctgacggttccccgcatcattctccggcgcgctgggaagaagctccttcgcctgattcgctatggccaggatgcgcccgatatccaccgtctgttccatctgccccgccagcttttctatcctctcctgaagcgcttttgtctcccccggcataagaaggcccaaatgacggctttcaaaccggtattccggtgaatcgggaagacagcccacaaccggtattccggtctccgcctcgatccgttctttcaatcgtccgcaaacggaaggtgaagtccggttcagtatgattccctctatccggctgtccttcctgagagctgcaaatcctttcaccgtagcggccagggacagcgacgctcctttgccgtccattaccagaatcaccggagtctctgttatccttgcgatgtcataggcgctggcccgggtatcgattccccccacgccgtcataatatcccatcactccctcgatcacggcaatgccggctccggccttctctgctgaacggacaaaattttccttcacagccccctcctccaaaaagaagctgtccagattcatcccgggaatcccaaggacataacggtggaacatcggatcgatataatcgggaccgcacttaaacgaacatggatgaagccctctctgttttaccgcctgcaggaagccgcaggtcagcaatgtcttgccgcttccgctccccggcgcagcaaacatgattctgggcatcccctctttctcatgcccggaggacggttctcttcctccgaatgatatgatatagacgggattctgcccctgcatcaaatgatagctccctgtcctgaccgccctggatgcctgaacctgtacaatctccgcctcgattccccggttcttaagcatggcagtcaccaaagccagagattccagggcgatcacattgataacaatcctcatctgcccattgagggaaagcagcagctcgacaaccgcctccagattgcccgacgttcctccgataaatgcatgagtagccaccggcgttcctccggccgcctccccgtccccgctttcccccttattccgcctgtccgctatccgttttatctgttccagggcatccccttccaccaccgtcaggtttctaagtccggccttctctctgttcttacaaatcagttccaccgcctccgccttcttctcgaacgcatatgcggcctttatggggcggcaaagcagcgcctcgatggcgacggaaccggttccggccccgatatcccaaagcagggaaccttccccgagttccagtttggacagggctaccgcccggacctcgctctttgtcatcggaacctttcctctgataaaccaatcatctctcatcattttcttcctcaattaatacaaggctgagcggctcaaattctctgccgcacaggctctttgccgaaccttccgttatctgctcatcccggtaagaaagtttctcccccaccgtaactttcacgtgcccgaatcctgactccgtgagacggcggcagagttccccggcgccgttcttcccaccggttagaaggaaaatcttccggcagccgctctttagagccgaagccgcatcaaactcacagccatgggccgatgcaagcagggcgtcatcccaggagattccaagcctggccgcaaaatagctgaccgaagaaatacccggcagcacccggaagctgcagccgtttttcttaagcctctccgccagttttctggttccgctgtgaaaaccgctgtccccggaatacagtatgacggcgcgctgccagtcatggtggagccgcaatgcctcctccacctcaaagtccagataagccgtcttaacggcaggcaattctccctccgtctgttcccgtttgatacaggcggccgccgctttaagcattctgggcgctccaatcagaaaatcgctgtttcggatcgcctcccgcacctcctgtgtcatcagcgtctcagagcccggtccgatgcccgcaagcagcacctcccgtctttcaaacggcgttcctctgacggaaaaccggctcagctgtgaataaatttggttcatcccggagccggtttctttcggatgtccaatgataatcactgaaacgccgcattccctggcagcctccagcttctcatcgaagcctcccgcctttcccgtctccttagtcacaagataggcggcgtttgtctggcgcagcatggccgcgttcatctcctttgtaaacggtccctgcatacaaatcaggtgtttacccgtaatgccaagctcctcgcatttcccaactgcaaatgaggagggaaggacgcgcgcaaaaatccggtgtttcagtttttccgttccggcaaacgccgccagttcattgctgccggttgtgacaaaaatatttccctttgtctcctccagccatttggcggcctcctccggtgtggaaaacagctcgtctcccgcattttcccgttcatcctccgtatttcttaaataccgcagatatgcggttccggtatcacggcaggccgactttatattttccgtcgcattcctcgcgtacgggtgagtggcgtcaactacaagctctatcgcttcgtccgcgataaatgccctcatctgccctgcatccatggggcctgtcaaaggacgtacatacagatcctccttcagaagctcccttccatactccgacaccacgctgacataagccgggatcctgttttcactgcaatattccgccagaatccggccttccgtcgttccgccgaaaatcagtaccttacacatttttataccctcttggcgtgaccattctgccgccggcctcctttgtcatcctgttgccgataaacacggtggtaaacatatcggccggtgcatccttaagctgtttcagcgtcattatttccatatgttctcccgcgcgcccgatattcctcacaaggccgcagaccgtctcctccgctttatattccagcagaatctcacaggcccgtttcagataatccgaccgcttcctgctcgccggattatacaggcagatattgaagtccccctccgccgccgctctgaggcgcttctcaatcacttccatcggcgtaagcagatcacttaaacttatcactgcaaaatcatggcccagaggcgctcccagaacggcccctccgctcagagccgccgtaacgccgggtatcacctccacctccacatcggggaagcctgccgccagcaaaagaatcagaccggccattccgtatacgccgctgtccccgctgcaaatcatggccgtcacctttccccttgatgccgtttcaagagccatcagacagcgttccttctcctgccgcatcggcgtcgtaagaaattccctgccggggaaatgttcctttatcagatcaatataaactgtgtatccggctatcacgctgcattcttccaatacctgcgccgcccttatcgtcatctgctcatacgctcccgggccgatgcctaccacgtataatttctttttaagcgcttcttccttcactgctttatcccgcactttctcaatctctattgttttatcctgcatatgcactgttgttcctctcccggattattttatcggatatctaaaacgttactgttcacacggttgtattccgcgaggtgttttcgtgcgcgttttgcacgaaaatcctgagttttacggcgcgaaaggcgctttttgccgtttctgtgcatcgcgaagcgtgttattgttcacagcacgccgctttttggcggggtgtgaacagtaactctaaaaccgaatcgtaatttcttcgactgctatagccgcggtcacagaaggaaaaactcttcttcctgctgccaggacggctttttttcccctcataccggcccccgccagagcggcgcgctcacagacatttccgacgccggtgacgccccttacaaattctgattcggcaaaactgccgtccaccttctgaagctcttctgctgaaaaaacgttccacaaaagccctcgcgccgccgccagctctataagcgcggcttcgtcccgcttcagctcaatgctcgccagcattctgacagctctttcatcaaacccgctgccggacagcatctgtctggcagcttcctccaccgcagcggtagaaacgcctctccggcaccccatgccgagaaccgcagccctgggaatcaggcgaagccggctggtacccctgccgggaaaaccggcgctgttaccgtccgaactgcggcaggtgacatggatattttttcgccgccataccccttcggtcagcggctccggtattctgccctccaccggaaaatcactgaaaaagcctaccggctcgccccgcaggactgcggcggagatttccttcgcctcctttaaatcatcgatcgccagttcatttttctttgcaaacaaatctaccgcaaaagcatggtttatatcggtagccgttgttatcaccggctgtgcgcccaaaatggatgccgccgccagcgccagttcattggctccgccaagatggcccgacagcagggaaacggtaaaattccccagctcatccaccacgatcacggccggatccttgtcttttcctttcaaacagggcgcaatcgagcggactgcgataccggctgccccgacaaaaaccagtccctcctcatcccgaaaggctgtctccacgaatttactcagagggattttaagcttctgcaccgaaaaggcccgggactgatgtcccaggtccttaaatcctctctccaaccgctccgccgtccttcctccctgaagggtaaaactaataattgccagcctcatccttatgctcccccttctcatccgccagccccgtcctgaatccggtggtaaaggcggggtcatagagttttgatctctcgtagcaattgtgggcaatggcatcgcctaccaaaatcagcgccgtctttgtgatatgctccctggcggctgtctccttcagtgttcccaccgtgcagagcattttcttttcatccggccacgttgctttatagacaatggctgccggcgtatctttctcatatccgccccgtatcagctccttagacagcggcccgagcattcctgtgcttaaaaataccgccatggtcgccctgtgagcggcaaatgacgcgatgctctcccgctccggtaccggcgttcttcccgccatccgcgtaatgataacactttgcgatatgcccggaagcgtgtactccagattcattgatgccgccgccccgcagaaggaactgacgccgggacacacatcatatgtaattccaagccggtccaggaagtccatctgttcacggattgctccgtaaatactggaatcgcccgtgtggagcctgaccgtctccattcctttatcctccgcctcttttatcttcccgatcacctgctccaatgtcatccccgcactgtcatggacaagacagcctttcttcctgtactcaagaagttccggattaaccagcgaacctgcataaataatctgatccgcctccccaagaagcctggctccccgcaccgtaataagatccgccgcacctgaaccggcccctacaaaatgtaccatctgttttcctccctgtaaattctctgcaacatctttatcttatatttcgcatttattcatatttattaataattatacatatatgccattgttccagttatctatcttttaatgctctgtccttaacgataaccgcgctctgctcacaggccgccgccttcaataatacggtaagctccgccgctccttccgtcgccgccagaagccccttttcctggttaaacagaaccacctctgtttttacggcgaaaccatcctccaggttcttttttacccggcccgccgcctcatccataaccgctctcaggcagccctctcttttaagaaattcggctgcctcatctgtcgtattcatgccatggagccggtcggccgcttccggcccgagccccgcctttcgggcgcagtcggccaggatctccattcttctgtctccatacttcgaatgggtgttcatcacgcctcccgctaccttgatgagcttcccaagatggccggcaagaagaaccctgtcaatcttttcttccttcatcatacggaaggtatctcctatgtaattgctgcacttgacaaaagaggacatatcaagcccaaattcctccctgagaaaacgttccccgtaatttcccggggctgccgccaatattctcctgccctccgaagccctgactctgatatccaggcgtatcgtctcgagcagcgcattctcgctcatcggattcacgattccggtagtgccaagcacggatatccctccggttattcccagtgcagggttgaaggtcctgcctgcaagctcctttccttcgggtatggaaatctctattataattctctcgtccggccttccatagcagcaccttgcctcaaaagccgcctcaagaatcatctctctgggaaccggattaatggcatagtgcccgacaggacaggatagccccttctttgttacaatcccgacgccttcgcctccggtcacataaactcccggataccggtccgaagtataacagggctgtcccgggtcttcctgtcccgccagacacgcttttgcacaaatcagagttccgttcgtgacatccgggtcgtcacccgcatcttttttcactgagcacatagcccagccacccttttcagcggtaaaatgaacaacctggattgccgcccgccgtccgcccggcagaagtactgaaaccgggctttctttcgtcccggagcagagtaaacgcacggctgcccaggcagccgcggccgcgcaggttcccgtcgtatatccgcttctgagtttattattctccattcctctttggcctttccccagcagaatcaaaattcgtataaatgatttcgatatccattatatgggatcagttgttatctttcaatacttcctttttcatttctcttttccgctttgtaataagaccgccgatccggccgctctctttagccgtcagactgcgccagccgccgtttatcaccttgtctgccagccccagttccgtggcaatttcaaatttcatcatatcctccggtttcagatccgccggatcgaatttatcgtttttcttagctttattttccataataaaagcacactcctttccaaaatgtacttagagtatgccccgcggtttcctgtatatacaaaatttatatatttattccagattatagcagttcagacagcataacttcttgtgctccggttttaataccctgtaaaatacagttatagttgactgcactattattcagaatatacttaaatcagaacacacttcaagttttttacatatttcgacatgtttttaccaacatttttttcaaacatcgctgctattttgttaaaatagaaacgagaatttgtaactaggggagatttaaatgaacattgctattatagaagactccgggcaggaactgtctctgctggaacgctgcctccagtcatacctgtcaagccgccaggtgtacagagtaattgacacctacactagcggagaagcttttttagaaaactggccttccaaatcctatgatttggtttttctggacatactgatggagggcatctccggcatagaggttgcgagaaaaatacgggaaaccgattcagaatgtcttctgattttcatcagctccagcaaagagtatgcgcttcagggctttgaagtacgcgcctttgattatctgctgaagccgctgtccgaggaacggtttcaaaaaaccatggatctgtgccagaatgaactggctaagcatatccgttatatcgaggtaaaagaaagccgcacgctggtcaaaatacctcttaatgaaattatctataccgattattataatcactatattcaaatccacaccgctgccagactgatccgctcctaccagcagttcgacgtgttttcgccgctcctgctgtgttatcctcagtttctctgctgctaccgcaactgtatcgtaaatatggatcatgtagactctgttgataagcacgactttgtgatggaaaatggagaacgggttcccatcacccggggcaaccgtaattcaatttaccaacagtatgccgattatcagtttttaaaaataaacggcggtatttaaaatgtatttttatgcacaaacaacaggcgcagccatgtccgctccggacggctgcgcctgtcttgaatttatgtctgctgctttaattgccgccggtgaattgtatctcggcagaacctgccgcgcagtcaatcttcaccgtcttcccgctctgagcatttatttttttatcattggacaggcccgaataaacagactctccgatcacaacatttcccaccgcattttcaagataaaagttataatcccggtcactgcccggcaggaatacacggaccgccccggcctttgactcagtctccagataggtttcgaaatcgcctgatgccgtaatgctgccggcctccaccgtgagttctgcatttgacgcccggaagctgccaatcctcacttcaccggcctgtacctttgcctccagatcatcggcgctgatggctccggcctccatatatccggcttttgccttcagctccgcttcccggaaccggtatccggaaggaatttccacgattccctctgtatagccggtaattctgccggaccatgacgagcctctgtaagaaaatgaataatccacagagagttcatttggcccgtcattctctgttttaatcctggcataacggtcttctttcatataaacccggatttcgttagtcagttcaggattttctacaattttcaccgccgccctttcggcttcaatttcaatctttgcaatattggtataagagccgacgagcatcatttcgtttttctcggaaatgttaaaatcatcggaataatcccaatcctcttccggctccaggtctgaatcgaagtctctgatttggactctgccaggccgcagggcattcccgatgctcttcattacgccgaaattaaaatggtatccggccaggctgttgtatgacttctcttggacattcccgacagcagccgccagcgctgtaatcgctgtgccgataaacagcagggttactccggctattacaattcctttcatccattttctcatctctcatcctccttgcggcaattaccgctctgattgccgggattcttccctcctttatgaaacaatttctttacgaagccggcgatccccataaccgcccacggaagaaactttccatagaacagccaggaacagcacagcagcagtaatcccgcgcctgtaaatacaagacccagccctatgctcataacgccaatccaaaagctgccgaagagctgtatcaggccggtaaccaccatggctatcccgccaagaataccggctaatgtcaaaactgcaagaaccagcaggcagaccgccagcacagcaacaaatccggtagcagttccaaacgcgccgaacacggccgctatcacaaatggtcctgcaaaaagaatgcccagggctatcaacaggtacttccaccactttccgtcatccggattagcgccctggctcttatcggcataacttcccttttcatagtaacttcccttttcataatttccccggctgccggaattaccggttctttctgctccccgatatccattgccccggtattccctgtctctgcggtactctccgccgctgcgggattctccgtcccggctatgctcctgctgctccctgcccttcacagccggataggacgatgtattgaaccgatgatcatcatagccgttatctgtaaattctcccgcgccttccatacctcctaaaagttccgtgcggatcatcgaagcaatccgttccgggcttccgaatccttccagaacctctgcctctctctccggaccggcctcctccagatagtcgctgtaatagtctatggcatctctcttatcatcctcctgaatatcctgaagcagatattccagttgtcttataaattcttcttttttcatcttcttcatacctccccaggatttctgatattctgcgtgagtagatactccactcactcttatagaggttcagctgagcgcgtccgttctccgttatcttatagtatctcctgtttcttccgtcaatagccatatcataggtttccagacactcttctttctgaaggcgtctcagcaccgggtacagggtcgattctgaaatttcaatagcccggcggacatcctgggtaattttatacccgtaagttccctgattctccctggaaacagccgccaagacaactgcatccagaagcgctgctcctgtgttaaataccattctctcacttcctgttctgtagacttaatttaccaataggaacttgtgttactgttctatcctttataacgagttgcggttcatgattactgcaataatattataatatttttaatattgtttaattcttaatattatcttatcatcaatattacttttctttcaatattatatatcgtataatatataagtattataaaacacaggactgatattgtcaatcctgtgtttctgttttctatatatgcaaaagctttaactgactacggcagcctgtgcgcagagcgtgcaggttatcgttattcagcatcttcctgagctgccactgcttcgatatcaacatcagcgatgtcttcatcaacaggagcctcagccggagcttcaagagcctttgtgctgagactgatctttctgtcagcttcgttgaagtccacgactctggctgtaatgatctggcctgcagataatacgtcggatggcttctcaacatgctctctggaaatctgggatacgtgaagcagagcatctacgcctggctccagctcaacaaatgcaccgaaatcagtcatacgtgccactttaccttcaacaatattgcctacagcgtacttctcggcagcgttagcccacggatttgtctccgggaacttcaggcttaatgcaaccttctcgccgttgatgtctttgatcagagcggttactttatcgccaaccttgaaaaccttcttcggattctcaactctgccccaggacatctcggaaatatggagtaaaccgtcggcgccgccgaggtcgataaatgcaccaaaatcggttacattcttaacaacaccctcaactgtctgtccaacagcaatcttctcaaataattccttctgcatagcagctttcttagcaaccagaagctgttttctgtcgccgatgattctgcttcttctgccgttcggattgaattctgttaccacgaattcgatctcctggcctgcatatttggataagtctttatcataggtatcggaaaccatgctggccgggataaatactcttgttccctcaacctcaacaacgaggcctttctccattacctgtgtaactttctctgtcaatacttccttgttctcaaatgcttctttcaggcgttttaatcccttatcggcagccagtctcttataagataaggatgccatgccttcgccgtcatttactttaagaacctttacttctaattcgtctccaacggaaacctttgttgttaaatccacatttggttcattcgtgaattcgcttctcgtaatgataccttcggacttacttccagcgatactgagaataatttcatcttcttttacgccgatgacctgaccggtaactgcctctcctgcacgtaatcgcttaattgatgattcttcaaacatttgttcaaaacttaattctgacattagtatgaacctcctcgataatttgattcggggttgatgcccctgctgtaatacctacgctgcgcacagaacctgccttttcaggtttgaaatctttcagtgtctggatatagtaagtctccttacattcccttcggcaaatctcatacaacttctgagtgttagaactgttccttcctccgatgacaatcataacatcaacctgtgaagctatctgccttgcttccacttgtctttcctgtgttgcattgcaaatcgtatttaaaacaagtatatcataacgcgttttagaaattttttcaactaaatcttgaaatttattgtagttaaatgtcgtctgggcaacaatacacagcttttcaccgtctgaaatctgtaatttttcaaattcttcagccgtttcaataactaaagtatcgtcatttccccagccctttattccctcaacctccggatgttttccgtttccgactataatgacgcgccggccgttttcattctgttcgctaactatccggtgaattttttttacaaagggacaggtggcgtcgataatttcaattccgttcctctcaagaatatcataaatatcttttcccacgccatgggaacgtatcactacgacaccgtctgtaagctgcctcagttcttccgccgtctcgagaactttgacgccccgttcctccagatcacggaccacctcttcattatggataatcggcccgaaggtgtaaatcggcgtttttcctttttctatctgctcgtaaaccttttccaccgcccgtttgacgccgaaacaaaaaccggcggtctttgcaactgtcacatccatattaacacccgcagcagcccttgctgcccgcatcctccaccaggctttccatctcgcaaagcacttcctcaagcgtcatctcggaggaatccagaagcaccgcatcttcagcctgtgcaagcggcgcaatttcccggtgcatgtcgcggtaatctctctcaataatgtccttctctatctcttccagactgcaatccacatttttttcctgcagttctttgtagcggcggatggccctgacacggctgcctgccgtcaggtaaacctttaaattggcgtcgggaagcacgcaggttccaatatccctgccgtccatcaccacatcttttctctgcgcaagcttcctctggagctccaccagtttcctcctgacaggcgcataaaccgacgtggacgatgccatgttgcccacctcctcggttcttatgaggcttgtaacattttcaccgtttaagatgatctgctggacgccgtccttatattcgagggaaatctccacaccttcacaggctgcttcaatcgcccctgcatcgtctttatcaattccttttctgagaaaatataaggccatggccctgtacattgctcctgtatccacataaatataaccgagattttttgcaagctgctttgcaaccgtgcttttgcccgcgccggcaggcccgtcaattgcgatattaaacggcataatccgtcttcctccctgtactttagtcgctgctgtccacactgcagtctttattgatggcggtgacctgagcgcggagcgtgcaggttatcgttcgttacggttctcagcctgccaaaaacgcagttctgtgaacggtaacagcaacctttaatcctccccagccgcgcttcttcccgccaggactccggtcgaccatgcaatctgcagattgaagccgcccgtcacggcatccagatccagaacctcccctgcaaaatacagttttttaagaagcttcgactccatcgtggatggatttacctctttaaccgtaatcccgccctgggtaatgatagcctcgttgaagccgcggagaccgtttatcgtcagggtaaagcttttcaccgcttccgcgagcctcttgcgctcttctctggttatctcattaacctgtttctccggcgaaataccgcttctttctatcattaccggaatcagcttcgagggaagcagatggttcagcgcattcttatactgcctgttcttcgcctcgtcaaagtcccggagaatcctggcatccagctgttctgccgaaagcgccggcttcagatcgatagaaagtgtgacgtttccttttttaagccgcttcgtaatatagctgctggcgctgagaagcacagggcccgaaacgccgaaatgggtgaacagcatctccccgaaatcccggtacaattccttttttccatcccttatgacgacctccacattcctgagcgaaagcccctgcaagtccttaaccactgtctcttccgtggtaaaaggaaccagggccgggcttgtcccggtcacgctgtggcccgcctcttttgcaaagcggtacccgtctccggttgaaccggtggtcggataagagaggcctcccgtcgcaacgataacggccgaggccgcttcctttttggacccccgctccagaatcacgccttttaaggctccctcctccagccatagctcctttacgccttcattcaggcggatatccacatccagggcccgcaatcttttcgatagggcgcttatgacatccgaggatttatcggatacggggaaaacgcggcctccgcgttccgtcttcagacggcagcccgcatcctccagaagctccataatatccgtattcgtaaagccgtagaacgcgctgtataaaaagcgcttgtttgtgacaacaccggcaaacagctgatccatatcgcagttgttcgtcacattacagcggccttttccggtgatgtaaagcttcttccccagtttttcattcttttcatatataactgctttttttccgcattcagcggcggcgatagccgctgcaattcctgccgccccgccgccgattataataattttatccataccggtaattcaatccgggcagactgcccgctccttcatcaagtgaataacaatagtaggatactatgaattgctttctttttcaacctcttttattttttcctccagcgcttccactacggttctgagaactttcacccgggcataatacttggaattcccctccacaatcgtccacggcgcgtaggtggtggaggtccgcaccagcatctcgttgacagccgcctcataggcatcccatttctccctgttcctccagtcctcatcggtaattttccactgcttggccggatcgttcattctttcgttaaagcgccgctcctgttcatccttatcgatatggagccagaatttcagaaccacagccccgaagttcgccatatgagactccatctcattaatctcctggtatgccctgcgccagtcctcctctttgcagaagccttcaatccgctccaccatgacgcgtccgtaccaggtcctgtcaaagatggcaatatggccggccttcggcatgttgttccagaaacgccacagatagtggtgtaccttttcaatatcattcggcgcagccgtgggatttaccttgtaacctctcggatccagatggctggtcagccgcttgatggctccgccttttccggctgcgtcccatccctcaaatccaatcactaccggtatcctcagccggtagatttcactgtggagatactccagttttttctgcagcttatccacctgctgcttatactcctccttgtcgatggacagggaaagatcgactccggacagcgccccgttcttaaaccgatcctgaggcatggcggcagagggagcatttcctgcctccttcttttcctcttcccgtttatgcacttcatattccatacggtcggccacggtcgccaggattttcatagccgcataattcttgtcggtggcctcaattattgtccagggcgcatatcccgtatcggtatgctcaagcatctcctcattcatcatcaggtatttctcatactctttgttccgcttccagtccccgtcggaaacacgccacttcgtctccttgttctccgtcagcttttcaaagcgttttttctgttccttctgggaaatatagagaaacagcttgattatcacacagccgtcctccgccaattgtttttcaaacgaagtgatatcggcaaaagcgcctgacagttccccgcgtttcgtaattttatcaaaacggtcgaccgtcactttatcataccagctcctgtcaaatatagctatacggccgtcctccggcgttttcgtccaatagcgccacaggaaaggacgcatccgctcttcctcgcccggcctcctgctggcatatacgtcaaaacctctgggatccagcggctggatcaggcggttgatctgcacaccctttccggctgctcccagcccttcaaagacgattattaccgggatcttttcggccttgcatcgtctctgcaaaagccccaggcgctctcccagctcttcgctgacctgtctgtaagtctccttgtcaaccgttttctgcaaatccaccttttccagcataactttcctccatttccaggccgcgcgctcaatctgagacgttctccctgtctgctgccgtcattgcttcatgttccttttttatctcatggtacagatgtaccgaatcccaatctttattcacagatgtcagaaccgccttataatcaatacgtccgacacccttttttcgcagcgtcctgataaaggaatcgacctgggaggatgtaagtcctgcaagcaccgccatctcgtcatcaaaatcactgcacagcccgtctccggaatggtcagcctcggtaagctcctccattcccttcaccccggcgagagtcccaagcggctttccgtagtcttccctgcccaccgtctttacccggaatcctaaaggcagaagcgcctgcctgattttcatcagcctgtccttatcattaaaattgtaaagaagtactgtttctttcattattatatctccttctttaaatcgcttcagaacaaggtcaattgctcgtactgatagtttttcttatatgaatgaattatatccggcattttgtataaaataccggctttgctgcattcctcccccagaagcctgtacaggctcccggctttcggactgctgcatacatagcgttcaccgtactgtttttcataccgttcacgaagtcccatatccgggaaaatccggtcaagccggctgtaaaaatactctctctgccggtcccttaaagtcacgccgaacatggggtagataaatctggctcccgcttccctggcaagctccaccattcccataacattctccttcgtgtcttccagaaacggaagcacaggcgtcattacaactccggcaaacagccctgccgcggagaggttcctgactgcggcaaatctctctgaggatgtaggcgcacccggttccagcttttttgacagggaatcctcacaggttgtgatggtgagcatacagtttacaggagcctgttccgctattatctgatatattggtatatctcttaatatccccgtgcttttggtcagcatggatacgccgaaaccaaaggctgcgataagctccaggctgtgtctcgtaagctccatatgaatttcatggggattatatgggtcactcatggctccggtgcctaccactcctttttttaccttgcggcgtaaatcatcccgtacaatctgaagcgcattttctttagcctttatctgttcaaaatcgtcgacacggtagcagctgcttctgctgtcgcaatagatacagccatggctgcagccacggtacagattcatattataatcacttccaaaccaggacgtgtctctattcttagtaataatcgtttttgccggaatcagttccattcctccgcgcctttctggctgtttttacaagggccgcccgtctttgcagggcttttgcccggacaaacgccgttcactctcttcgcacctgccatccgcaggaattctctcatggccgctgtgatatattttccttttttgctggcaaacaccaccttgcggctggccagcggatcgccaatcttataatataccagcttcttgttttccggaaggcagccgataatatcggaacggataaatacggctccgacaccgttggaagcaatattcatagacgtgagaacctggtccatctgaattgccacctttggcgtaaatccggcatttcggcacatgctgaaccccctctgatacatatcattacccggtttcatgataataaacggcgtatccttaaacagttcaagcggtaccggctcataggagtctgcctggaaacggtccgacacgacatcctgataggaaagccggtatggctggagcctcttgttgatcgcataagaggcgggcaccatcaggattatctcttcatttttataaaaaaaccgctctactgtggaatcttcatagagcgctgtttcaatgaccagatccagtgtttcgtcttccagcccctccttcagttctttgacattcccctcgagcagatcaattgtcacattgggatacttctccctgaaacggccaatcagatccggaaagacaaaggaacagaaaaacgaggctccgcctatagaaagggaacctgtgttcagttcacgcaaatctttgaaatatgcctgcatgttccgctggataaacaaaatttcttcaatcgatttaatataatatgcgccctctttcgtgaccgtaagcggtatcgtgctgcggtcaaaaatgggcgcacctatctcattctccgccttgcgcaccatgttgctcagtgcaggctggctgataaaaagttttttcgctgcttttgaaaagcttttttcctgatataccgaatacacatacctcatctcattcagcaaataaattccctccgtccgttatatgtatctcacgatggacagcatagcgagtacactctcccctgattatcctgaacccacccattaccaaaaacagaaagccgcctccggccgcgccggaagcagactttctattaccggatcttcattatcccctgtttttagtttaccactatttttcttcacaggcaaataacttttccatttttttacattccttaccatccagcgggaagaagcttgaatgctccgagaattgcatatacgatagtaccgctgtaaagaagaataataatcccctgaataaatgagttatacatccagccgcagttccaatccggctcgatctctcctttttttcttgcccctttcagcataaaaatcggaaggattgccataattgcccctgcaaatgtgccggaaaagtaaatcgcatcaacgaatccgactgctccgctgagtgtcagcgccagcggaatgccaacaatcacgattgtgatcggaaggcggattttgacatcttcatccgaatggaatttaaatttatctacaatgttcgaaagaagagtctgggaaatcgcccagtaggaggtaagcattgcaatcagtgcgaaaatattggcgatataaagcgcccataatcccagggaacgtccccatgcaatcgttgcaacctgtgtcagatcctcagccggtgtgatatacataacgcccatcggaacaataattaaaagaacgcatacgatcaactgtccgagcgcgatggccggagccagctttttcggatcatgtgacagtcccctggccaaatcgggtaccaggtactgccctatgtaactgaatgcggcaacgttgaaaatcggaattgcatacgtccagttgctttggaaaattcttgataaatctccatttttcgcaatcatggaggctgcagtcagcaccaccagcataacgatcattccgatgctcatcagtttattgccgacacccatagcctttaatccgaaccaggcgacacctgcagccggaataaggaaaatcaaagttccaacccagtccggcacgcccagaagctcatttaaaatgttgccgcttcctgaaaaataagcaatcatgcagctcagggaattaattactaccgcaataaatatcaggatggagccggctggccccagataccgctccgccagtccgggaagctgcaccagtgttctcgtcctgagcgtagtctctgccacatacatcatggaaaacagagtcaggataccggtaacgatgaaccagaataccagtaccggaagaccggccagtctggccgaatatgccgtccccaggcatcccgaaccaataccgcagcctacgaccgaaaaaacgacctccgcctgagtcagtttatggatttttaacgctccctcttcatatttgggctgcgtcccttcttttttttcattttcccccataacaaactcctccgctcctaatatttttcaactgcgtccatcgagaaggtatcttccttgaaatcgttgaaatatggaatacggcttctcaccttcagcacctcattcatgtcaatgtcacaaacgagcagttcctcctctgtcttggaagcttccgccctcacttcgccgtccggtcccacaatctttgatgttccgcagcaattgtcctccaccggatttgaacctgccataaacatcaggttaaataaggcgttgccggccagatccacatcccatctgcgtgcagccggaatgctccataccgccgaacagaatacgagttccgctcctttgagcgcttcaatcctggacggctccgggaattccacatcatagcagattaacatgcctatcttgccgaattttgtattgattaccggaaaggaatctccctcacagaatttaagcttctccgtaccccaggcattcacttttctcatgtttccaatcacgctgccgttatcatcgatgaaaatacaggaattatacatttttcccggaatatgtactgattctgcatagcctgcaatgatgtgcatcccctttgacttcgcacattttctcattgtctggacaaaaggtccgtcaaccggctcagccagtttctgaagctcttccgactcaaggaaatagcctgtgtacgccagctccgggaagcagataatatccacattctgttccgccgcctggtcaatcatctccatcattttgcgcaaattttctttggtatcgccctgaactaccttcatctgtccgagtgcgatcctgacttttctgtcttgtcccattttcctcttctccttttctttttctgtcttacggtccctttcatatgaaactgtcccacctaccgtatacagtttattttttctattctacatagctgaaaaatggttttcacctgttatacagatttctaaataagttataacccctttgttataactgttattaatgctgcagagattatgtccgccggtgtttaaacggcttcaaaaagggcgcctctttccggaagcgcccctgaaacaaaatattatcccctgttatttctattcttcacccaggcagaccatcttgccgtcttttacgattaactggccgtcaaaggtaatggtcgggttgtactgcaccatgtcgatatgtacggtggagcgtgccggctggccgtagtagaaaccgttgcccattgcgatatggcaggttccccttgccttcttctcttcctcaaagtctccgttgaacatgcaggccgggtttaatccgattccgatctccgcaatgttgtcgctgtcttttacttccgctatctgacggcggatttctttacaaatctttgcgtctccgcccactacctctacgatgcgtccgccttcaatcttaagctctaccggtacggtcgggcagccatagtagcagattggtccgtcgattacgagctttccgtgggtggttccgatgaccggccctaaggatacttcgccgtccgaccatgccattgcgtctccaggattgcgggcaataccgcactcgatgattggttccatatcgttcatctccatgtacaggtcggttccggccggagttgtgatatgggcgttcttcttgcctctccatactgcctgcagttttacgccgtccgcatagactgcctcatagtctgctaaagctccgcctcttgtaaagttgtcgatgtgtcttaagcagatggatacttcacgcagcttcttctcattcataagctcttttaagcggttgttgtagatagccgcgccggatgccgtcgtcatacctacgaatacatcgcaggcctccatcgccagctccagtgtcttcgggaaaatcgttgctttgtcttttccgcggattggcatcatgcttacattatactctgctccgcacatcagggctgccgcagccatggcattcgccatacgcatgtcggtctgcgggtcaatggcaatcaggacttcctcgcccggttttactgccatcaggtttgataaaatatagtgcgccctctcgatacattcaataattctgttgtcttccataaatttttctccttttccttaatatgatttgtaatatagtttcaagctctcatccggcttccggcgtctctgtctacgccgcgccctttttttcatccattctgttaaatgtatcgcgatccagctcaccctcaatagcagagatacatactgccgttaccaaatcaccgacagagttggtagaagtatgaatctggtcgataattctgtatataccggctaccagcgcatatgcttccagaggaaggcccatctgtgtcagcagcgtaaggctgataacaaggccgatctgcggcgttgccgcacagcctacacttaagaaggtagcctgcacaaccagcataatctgctgctgaatacttagatcaatgccgtaaagctgcgctgcaaacaatacgatgataccaaaatagatacaggttccgttcatattggcggtagctcccagtggaagcacaaagcttgcgatgtcctttggcacgcccatcttcttcggcgcaacctccatggaaaccggaagagctgcggaggaagtacaggtactgaatgcgatcatccagggctcaaatgctttcttccagaatttcagcggactcaccttggcaatccccaccaggaagatcgaatagaccacaacgcacatgataatactggacagatagtccgttaaaataaatttcagaaccggcccgaatattgccacgccgtattttgccagagagacagacatcagtccgaatacgccgaagggaataattccaagtaccatattgacaatcttaaacatggtctgggaacaaagagagataacatcggccagcggctttgccgaatctccgatgctgataatcgcaaaaccgacaaacagagaaaatacgatgataggcatcatatctccattggtcagcgctgcaaaaggattactgggaagcagatccagaatggtctggtaaacccccggcagttccttgacctccaccgtgttttcaatggttccgagaataagtcctttgcccggctgaatcagattggccagaacaagaccaatggtagctgcaatgcctgagctgactaaaaaccataaaatagtcttgattccgatacttctcagttttttgatgtcccccagcgaaagcgctgcatcaataatacagaaaaataccagcggaacaacgatcatcttgattaacttgatgaagaaatcgccaagaaattgcaggaacggcaaaatatgattattaattagcggattatccacccctcccataaaattcaaaatataaccaaaaataatacctgcaaacagtgcaataaaaatcttcacgtacaacggctgtttcttttttgttttcacttctcctttttgtcctgccatatggacccccttttaccagaagaacaatcaaccagtttccctttcctcatgaggatgtgctccattctagcagcttttcgtgatttattaaaaacttatataaaaatacgaataatccatatatttttagtaataacttacaattattttattaataaatatctctatataaaaataattactataaaatcaatatattttccgttataaattagttagtttgtatattgttattttttttattttcttatcacagacagatatcaaaatccggcaggcacgactccaatattaatccccgtttccaactagagcatatttgaaaattgctttccgtcaaatctcccgcgatgtggggcgggcagatggcgggaatgaattttcaaacatgctctaaaaaggaggcgcctgccgcaaagcatcgagcgcctcctctgttaaaacaggaagttaattattatttgcaattctttctattcttcacccagacaaaccatcttgccgtcttttacgattaactcgccgtcaaaggtaatggtcgggttgtactgcaccatgtcgatatgtacggtggagcgtgccggctggccgtagtagaagccgttgcccattgcgatatggcaggttccccttgccttcttctcttcctcaaagtctccgttgaacatgcaggccgggtttaatccgattccaatctccgcaatgttgtcgctgtcttttacttccgctatctgacggcggatttctttacaaatctttgcgtctccgcctactacctctacgatgcgtccgccttcaatcttaagctctacaggaatggtcgggcagccatagtagcagattggtccgtcgattacgagttttccgtgggtggttccgatgaccggccctaaggatacttcgccgtccgaccatgccattgcgtcaccaggattacgggcaataccgcactcgatgattggttccatatcgttcatctccatgtacaggtcggttccggccggagttgtgatatgggcgttctttttgcctctccagattgcctgcagttttacgccgtccgcatagactgcctcatagtctgctaaagctccgcctcttgtaaagttgtcgatgtgtcttaagcagatggatacttcacgcagcttcttctcattcataagctcttttaagcggttgttgtagatagccgcgccggatgccgttgtcatacctacgaatacatcacaggcctccattgccagctccagtgtcttcgggaaaatcgttgctttgtcttttccgcggattggcatcatgcttacattgtactcggctccgcacatcagggctgctgcagccatggcattcgccatacgcatgtctgtctgcgggtcaatggcaatcaggacttcctcacccggttttactgccatcaggtttgataaaatatagtgcgctctctcaatacattcaataattctgttgtcttccattgttattctccttttcagttttcagatttactcctggtttcgtctggagcagaacctttgtctctgtttcagaacctgaatatattgtaataatttccgcactgtttttcattcgttatacgcttttttctatggcatatcactgtttagttatacgtctttaaccccggataaaagctctgccaaaagccggtctgcctgccgttgtgccgtcttaaggatttcctccggatcattgccgtatatgtcaagcccctcggcttccactgaatcgaaacgggcgattccaagcatctgacagaacgcctttagatactccacggccaggttcggataaccggaaggcatcacgccggtataacctcccctggtcgtcacgtagatcatccgtgaagcgcggcagtcccccaccgtctcccccttttcattgtaatggaacgtcatttggctgacgcacatgcgctccagataaacgcgcagaagacttggaaaggaaaaatcccaaaacggcgccgctatgataataatatctgccgaagcaaactgccttgtcgcaccgaaaaagggatcctcaaagcagccttccgataccagcctgtttcttagctccacttcaccggcgtttagcggagtcagattacactccataagcctcaccgtctctacgttgaggccgggcctgccgccaagtccgtccacaagccgggcggccagcctccttgttcgtgattcatcgcctcttatacagcagtcaacatacaaaatttttttcattactttccttctcccctcattaatactccttaacgggcggtgaaaagcaaactgcacctgcttttcaccgcccgcggagactctttcttcctctttctttattcctcttcctttttttccaccccggccattttcataaattccctcatggcggaggtcgtgtattttcccttctttatcgcaaagctcaccggccgcgttgccagcgggtcaccgattttatagtaggtcagcatctcattctccggcatacagcttacgatgtccgaacggataaatacggctcccacaccgttagaagcaatatttacggatgtaagaacctgatccaccaataagactgtgttcatggtaaagccggcattcctgcaaatctggctgcttctctgatacatatcattgccgggtttcatcgtaataaacggcacctcccggagttcatacagaggaaccgcttccgtctcactgtcggcaaatctgcctgtgagaatatcctgatacgaaagacggtaaggctggagccgcttattcacctgataccgggtaggaacggccagaatgattttctcatgattataaaaaaaacgttcaatatttgaccctacgtcagttgccgtctctattaccagatcgaccgtttcattttcaagtccttcccgtaattcgcctacatttccttccatcaagttgatgaccacattgggatacttttcccgaaatctgcctatcaggcctggaaatacaaaggagcagaaaaatgaagaaccgcccagggaaagattgccggtattcaggtttttcaaatccatgaaatacgacttgagatttctctggataaacatgatatcttcaattgacttaatataaaatgcgccctccctggtgacggtcaccggtattgtgctccggtcaaaaataataacccctatgtccttttccactttccgcaccattttgctgagagccggctgactgacctgtagctttcttgccgcttttgaaaagcttttctcctgataaacggcatatacgtatttcatctcattaagcaaataatttcccccagtcctgctgttttgtcactcgatatcatgaatgccaaaagacaggtccgatttggttcttaacttcttcagacctgtctcttaaatcaagctgcctgtcctttttttctgactaactgcattccggccagcactgcaaacagtgcaattccgatcagatccgttacattccccgcatcgaccattaaaacgccgcagataaccagcagcacactctcccaccatttacacggtgcgataaagtaccgggtaaagcctgtggcaatccctatcatgccgataattgccgtaataattgccttcgccaccatcaaaataaagtatggcgtgctccagcccggattgactaaaaccagtaccggattcataacaaatatgtacggtaccagataagccgcaaatcccagccggaaagcattgaatcctgtcttcatcggattcgccttggctattccggcgcctgcaaaggcggccagcgcaaccggaggcgtgatatcggccacgattccgaaatagaatacgaacatatgggctgcaatcgccggaacaccaagagctaccagagccggtgcggagatcgtcgcctgtatgatataattggctgtcgtaggcactcccattcccagtatcagagaacacagcatcgtgaataccatcgtgagaatcaggcttccgcccgccagctccacaatgccgttcgccatcttaagtcccaggcctgtcgctgtcacgacaccgacaataatgccggcgcagccgcaggttactgctactgatatagcgcctctggccgtctcttccagacagagaacaaactttttcaaaaattccagaacattaaaccgcttagtctcacgcactatctcaatcacccagataatcaggcatgagataattccgtacatggccgcgttcatcgccgaccgccccataaccagcagcgctacgataacgatgataggcgctaccctgtaccagcctgttttcagcagatatacaacctccggcctatgttccttcggtatccccagcaggccgtttttcaccgcttcaaaatgtacattggtaaaaataccggtaaaatacagaagcgccggtatacaggccgccagggcaatggttccatagttggttcctacgtattccgtcataataaatgcggccgctcccataatcggaggcattatctggcctccggtagaggctgccgcctctaccgctcctgcaaattcaggcctatagccggattttttcatcaacgggattgtaatcgaaccggtgcttaccgtattcgccaccgagctgccgcttatggtaccctgcaaagcgctggctacaacagctgctttcgcaggtcctcccacacttccgccgcaggcgcccatggccagccctgtcatccagtctcccacgccgctggccttcaaaaatgtggcaaaggccagaaacaggaaaataaacgacgaggaaacgtagattggcgaacccaggattccttcggttcccagccattccaggcagactaaccgcttcagcgtcatgcctctgtggaaaaggaagcccggaaggtaattgccgaacagggcatataaaaggaacacgctgccgacacagacgattaccagcccggccacgcgccgcgccgcttccagcagcagcaggatggctaaagcactaatcaccatatctgccgtggtaaagcggcctgcccgcagaagcagctgatcataaaatactatatggtatgcagagcaggcaaatgccagcgctgcaagaatataatcataaaacgggatcttatcgctcggctttccgttcatcggataaagcaggtaagccagaaccattgcagctcccacgtggggggccctttgcagggtggaaggaaaggttccgaaaagacccgtataaagctgaaagacggaccatgccaccgcaatgacaaatactatttttgccggagttccgctcaggcggcggaacttcgactctttgtcaaatttggtcatgacttcttcgctgctgacttcctgttcatctagcttaatggttgtgtcttctttatacattcctacctcctgtacctaaatgccgcactcaaagtgtcattacattcaactgcaggaatttaatcgatcagaaggccgggatcaacagttatgcctttttcttcataataacgcgccgcgccggggtgaactgcggtagtaattccggaaagtccgccctccaggctgatatctttaccggccgggtgcgctgctgcgatctcatccgcactttcataaaatgcttttgttatattataaacagtgtcatcatccagatccgaacggcagtacagcacggcctgacatgtaatcgtctggaaatcctcggtattgctgtaggtccccgccggaatcaccattttctcaaagtacggagcttccgcctgaatcttcgcaatctcctcatcgctgacgctgacataagacagctccgtggatgtcgtcatctctacaatagatgaagccggtacattaagaactgcacaggatgcatcaatatgtccgtcctgcatcttaacagcggcgtcgccgaacccatcctgctgcggctggatatctttattgatatcaaggccggccgcttcgaaaaccaggtccgacgttccggccgttcctgagccggtaggaccgatagctactttcagtcctttcaggtctgtaactgatttggcattcgtacttgcattggcaacgatctggtatacctcatgataaacaacgccgatggcacggaagctcttaatctcgcctgtatccgcaaaggcattacggccgttccacgcatcatccgccgtagcattcatcgcgatgccgaggtcaaattcgccaatgtccatcatattaatattttccaccgaagcgccgctggcctgggaatccagggacagcccctccagtctcttgttcatcgcgctggccatagcaccgcccagggcaaaataagttcctccggaagagccgcttcccatgataagcgctactgttttgccgctgggagcagccggctgtgcggtttcactacctgcaggctgttcctgctgtgtttctttgccgtccgccgaagccgcaggctcggttttggaactgcaggctgtcgccgtgaatataagaatcatcgccagggtgatgctcaaaattttcttaatttttttcatacactgtcctcctcttttgtaatgtggctatcttgtccgaagcttgcggtgcttactcttcgcccaggcagaccatcttgccgtcttttacaatcagctcgccgtcaaaggtgatggtcgggttgtactgcaccatgtcgatatgtacggtggagcgtgccggctggccgtagtagaaaccgttgcccattgcgatatggcaggttccccttgccttcttctcttcctcaaaatctccgttgaacatgcaggccgggtttaatccgattccgatctccgcgatgttgtcgctgtcttttacttccgctatctgacggcggatttctttacaaatcttcgggtctccgcccatcacctctacgatgcgtccttcttcaattttaagttctacggggattgtcgggcagccatagtagcagattggtccgtcgattacgagttttccgtgagtggttccgatgaccggtcctaaggatacttcgccgtccgaccatgccattgcgtctccaggattccgcgcaatgccgcactcgatgattggttccatgtcgttcatttccatatacaggtcggttccggccggagttgtgatatgggcgttctttttgcctctccagattgcctgcagttttacgccgtccgcataaaccgcctcgtaatcagctaaggctccgcctcttgtgaagttgtcgatgtgtcttaagcagatggatacttcgcgcagctttttctcattcataagctcttttaaacggttattgtagatagcagctccggatgccgtcgtcatacctacgaatacatcgcaggcctccatcgccagctccagtgtcttcgggaaaatcgtcgccttgtcttttccgcggattggcatcatgcttacattatactctgctccgcacatcagggctgccgcagccatggcattcgccatacgcatgtcggtctgtgggtcaatggcaataagaacctcttcacccggcttcactgccatcaggtttgataagatgtagtgcgctctttcgatacattcgatgattctgttgtcttccatagtctctccttttcttgaagtgatgtgagttacagttactgccggaaacccggcgattatataaaaacagttttactactgtccttatctattccacttctttattcgacaattcaggcaaaaatcaatatagtatctgttataattctatcataatgttaattttccataaattgctatatctttttatgaatgaggtataaccattttgttatatcataaaaaggcggtgaaaagtcagccttcacaacttttcaccgccgtaattcaaataaacttaattcaatttttgttcaattattcttcgcccagacaaaccatcttgccgtcttttacgattaactcgccgtcaaaggtaatggtcgggttgtactgcaccatgtcgatatgtacggtggagcgtgccggctggccgtagtagaagccgttgcccattgcgatatggcaggttccccttgccttcttctcttcctcaaagtctccgttgaacatgcaggccgggtttaatccgattccaatctccgcaatgttgtcgctgtcttttacttccgctatctgacggcggatttctttacaaatctttgcgtctccgcccactacctctacgatgcgtccgccttcaatcttaagctctaccggtacggtcgggcagccatagtagcagattggtccatcgattacgagttttccgtgggtggttccgatgaccggccctaaggatacttcgccgtccgaccatgccattgcatcaccaggattacgggcaataccgcactcgatgattggttccatatcgttcatctccatgtacaggtcggttccggccggagttgtgatatgggcgttctttttgcctctccagattgcctgcagttttacgccgtccgcatagactgcctcatagtcggctaaagctccgcctcttgtaaagttgtcgatgtgtcttaagcagatggatacttcacgcagcttcttctcattcataagctcttttaagcggttgttgtagatagccgcgccggatgccgttgtcatacctacgaatacatcacaggcctccattgccagctccagggttttcgggaaaatcgttgctttgtcttttccgcggattggcatcatgcttacattgtactcggctccgcacatcagggctgctgcagccatggcattcgccatacgcatgtctgtctgcgggtcaatggcaatcaggacttcctcgcccggttttactgccatcaggtttgataaaatatagtgtgccctctcgatacattcaataattctgttgtcttccattcttcttctccttttctttgaacatgctattaattgttaaattgacagtttctttatctttttatttctaatgcgtttaaaataccatccaaagctcacattcttaagactttttaagctgcgctttttccatcacccatatcgttgaatttatcgcggtcaagctcaccctgaagcgcagagatacatacggcagttacaaggtcgccagccgagttggtggatgtatgggcctggtcgatgattctgtagataccggctaccagagcatatgcttccagtggaagtcccatctgtgtaagaagcgtaaggctgataacaaggccaatctgcggagttgccgcacagcctacacttaagaaggtagcctgtacaaccagcataatctgctgtgaaacgcttaaatcaatgccgtaaagctgggctgcaaataatacgatgataccaaagtaaatacatgtaccgttcatgttggccgtagcgccgagcggaagcacgaagctggcaatatccttcggtacgcccatctttttaggagctacttccatggaaaccggaagtgctgctgaagatgtacaggtactgaatgcgatcatccacggttcaaatgccttcttccagaattttatcggacttaccttggctatgaaaataaggaatatggaataaaccaccacacacatgataatacttgccagatagtcggttaagataaatttcagaaccggtccgaaaattgcgaggccgtatttagccagtgatacggacataaggccgaatacaccgaatggaatgattccgagaatcatgttaacaatcttgaacattgcctgggaacagactgatataacgtcggccagaggttttgccgcatcgccgatactgataatcgcaaagcccaggaacagggaaaatacgatgattggcatcatgtccccatttgtcagggatgcgaacggattgcttggaagaaggtccaggattgtctggtaaacaccgggaagctcttttacttcgaccgtattctcaatcgtgccaaggataagtcctttaccaggctgaatgatatttgccagaacaagaccgatcgttgctgcgatgcctgaactgaacaggaaccacaaaattgttttcacaccgatgcttctgagttttttgatgtcccccagcgaaagcgccgcatcaataatacagaagaaaaccagcggaacaactatcattttgattaattttatgaagaagtctcccagaaattggagaaatggtaatatgtactcattgataaccggattctctaccccacccataaaattcagtatgtacccgaaaataatacctgcaaacagtgcaatgaaaattttcacatacagaggctgtttctttttttccttaacccctcctgttgtttgtgctgccatattagtcccccttttttgtaataaatgattaactagtttccctttcctcatgaggtttgaacatattttatcaagctgttaacgcattataaactgttatacaagatccgaaatataatatagttttttagttatatgttaagacagtgttaaaaaagggcaaaaaaaggccgggaaatgtatgggatgttgtcgaataatcccttgcactttcccggcctacataaagtcccgagcacgtcctgcgtatattctattccgtcctgtaatcccttgccgcatcggcaagctgctgcaaaaccccctcatcgagatccgcaaaatacggtatgttttctctctgcctgtccgcttcctccatatcgaggtccgcaaacacaagctcttcctcctgtcccggcgactgggctatcattctgccgtcaggcccggcaactccggaagccccgcagcaaagctcgtccgcaaaattggctcctgccgtaaaaagaagattgtacaggctgcttcccttcaaatccagatcccaccggttcctggccggaacgctccacgccgccggacaaaatatcatccttgcccctttaagcgcagcaatccgggccggctccggaaattccaaatcataacagatcaaaatggccgccctgccaaattccgtctcaaaaacaggaaattcctctccctgcttaaatctctttttttcacttttccaaagatatacctttcttgcttttccggcaatttttccctgcctgtccgcaaaaaccgccgtattatagatatcattcgagtctccccgctcggcgaacccggctacgatacagatcccgttcttttttgccgcttcacagattccccggacaaattccccgtcctccctctctgcgatttccaaaagcctgtcttttttcacaaaataccctgtatacgataactccggaaaacaaatgatatcggcccctcctgccgctgctccggccgccatcgcctccatcttcttcatgttggcccgcgtgtccccctgcacggcccgcatctgccccagtgcaattcttacattcctcatcttctcactccattgtcatttttatgccgtacggaaagtataacatatcactcccgagtcggcaatgaggaatacacaaagcaaaaaccccgaaaccatattccgtttcagggttttcacataatccagtctgtagttgctctcacgttttccatagtctctcccattaaattcccagtaacctgcggaattttacgtctgcctccttttcgtctgctccgtcaaagtagaatatcaggaacttcttctgcggctgtattcccctttgcagttcgtcgtaactcttaacattaatcttcttctgctccgcctttatatatatgtcacatccaaacaaattagctgcctggattaatgcagatatcggcggcggcgtatttctttcgtttcctgccaaattgtactgtctggccagcataagcctccctccttccaaatattcgaggctgttaactatattctcattccactaatctgtcaatacatatttacataattattatctattattaaacattatgacaattttttgtccaattgtttatacatattttatatttaataaattctcataaatgtgtatctttttatttagttcttaagttagctccgcgggagatcgcactgcgtgattctttcatatcacagactttgtttttatggtataatgaccgcgtagcgggcattataccgcgcatcaacggtttctgcgtccaccgcagaaatccggcgctaaaattaataaaataactaagcgaggcattacatatgaaatttttagaaaagcatcccatgtacatgattgcaaccggagtagttggaatatcactgtctgccattatagtaaagtattcagacgctccctctttgattactgctgtttaccgtcttttctttaccgttgccatgatgacaccggttgtatttttaaaccgcagtttcagaatggaactctcccgcgtttctctgcgaacggttgttctgtgcgctgtcagcggaatctttctggcgcttcactttgtcagctggtttgaatccctggcctacacgtccgtagccagttccaccgtaatcgtctgtaccgagtctatctgggtggcccttggcttctgttttctattaagaggacgcttaaagaaaaaggctgttttaagcattgccgtcacctttgccggcagcatcctgattgccatgtccgattacggctcgggcagcagccttctcaaaggcgatttacttgcactctttgccgccgtcatggtggccgcctatacgctgctcggccggattgtccgggcggatacttcaaccacggtttatacttatattgtatattttttctgcggcctgtcactatttgccgccgcgcttatcacccgcacaccgctcaccggttacggcagttcatccctgatctgcggtttactgctggcaatttgctccactctgctcggtcacagtgttttcagctggtgcctgaagtatctctctccggcctttgtatcctcttcaaagctgtgtgaacctccggtagcctctctgtttgcgatgatactcttcggagaaataccgtccctgctccagatttcaggaggtattataattctggccggcgtaatttattattcgaggcttgaaaccgctgcctgagagcatgtttgcgaaccgtatcacgctcccaagcacgctcttcgatcttttcacgttgttcaatcaaagttttcgttcattttaggcctccgccttaatatgatagagtataaaccatcaaacggaggttctcatgagttcatacttatccgtatccggcgttatcacccggattcaaccgcttacaggagttaacagctcccagtacggctgtacattaaacatgtccatacgctcccttcaacagggagaagtaaatttcacagtaaccggcgatacttacgtagttgacaacacaacactgcatcccggcgatcaggtgactgtcttttacgacgggaatgcccctgcgccccttatatatccgccgcagtataaagcggttgtcatcgcgctctccgcttatcaccagtattatcttggagagttttataataattttgtcagtaccgacggaaccctccagttaaacggcatggcggcacagggtaccttccttcccaacggccagattttttccggcgctttagtcgggaaaacagcgcttgtcgaatacacctcctctacaagaagcattccggcccagacaactccggatcgtgtcattgtattttgttattcgtaaacccaggtcaaaaagatatcgcctaaatagaaaaacggttcgcaaaggtatcagcctctgcagaaccgttttcctattctcttctttctttattcccagcttctgctccatttcttaacccgctctcatgcgtccgtcattttcctgcgcattgtcagaaatctgccggcgcccgcatctaacaccttgattatagtctcgtccacaatgacagcgatcaggtatgacaccacgcatgtaaaaatataggggatgaccagctggccgatgcttttattctcccagccgacaggaataaatccgagcggaagaacggccgacaggacaaacagatgcaccatcaggacggaaaagcttcttttcccaagcctctcaaggatccgcgaaaagcggctgcatataccgttcaatctcagcaccaggacaaatacggctgaggccatcaaaaattcaagtatcgaacaatttgcaataatctccaggtaatccggacggaagctgtatatccacagcgagaaggccaaggagaaagcgccccctgccgccagaaagatatcatatttcctcatccatgccttattcagtaaatatccgcccaggaacaatcccagccaggaatccagatacagagaaatccccaattcgaattgaaaatacgtacatgccgtccgtatcgccaatgccgccgcaatcatggcaaacagcagtttttccatccgttcaggcattttcgccagcatcaggcggtaaaagggtactaacagatacagcgccagcagcttgtaaatcagccataaatggggccccatcgtgatggatgcgccaaaaaagctgagggcggcctctccggcccagcctgccgttccctcgccggtggcacaaagaagctttaaataaaacagggaatataccgcaaacggcagcacaattttcacaactctttttctataatactggccgatggtttcttcccggtatggcagaagcagggccccgctgataaagaagaacagcaggttgcaggtcagcacagacaaaacaaccgcctgaaaaaagaaatctctcggcgtcccctttatctgggtcacggcaaccggctctaccacatgcactgcaattacaaacagtgccgcaagaacacgcacaccatccagataagccgttctctgcctccgctcccccgctgtccggccgctctgccatgggactgtttcgctcttttacgccgttctgcgccgtgcaggcaaaaagataacggcagaacggcagcaagcagcagaaggcgcaggggattcacccggtcaagcatctgccggacagcaggtcctgcagccggtctttcgttcacggatacattctttatctggccggcccctgtcaacgtcagcctcaatttctcacacctgacatcaggaagaggaatgattccctttgtcgttcccctcagcagccagcgctcaatccggcgaaaccggttaaactcctgtccgctgttttccgtatagtatacaagaacctgcatcttctcgggtatcggttccgtaaactcaaactccagatagccggcccggatgcccggtgcaaaatccagccagggcatgtcctccgttgtctggtacggattcccgtttgccgcttcgccggccgtatattccgggactaatacaatattttcttctaaaatagaaccgcgcctggctgaaaaataagccaggcacaattctatacatattgctgcgataagccctgtcacaatcagggtaaagcatctctttttattattcatcttccgtctttcagattaccatacaacaccgttggcatcaatccacttgccgttcggtgcctgtctgttgaaccacattgcgccggttgccgtatcaaagaaataccatttaccgtcgatcatctggtagctggtctttcttgcgcctctcgttccgtcggaaaccggattcagatagtaccataagccgtcaatctgctgccagcccgtcttcatagcgcctcttgttccgtcagatacaggattcaggtagaaccagttattatctacaaaaatccatccggtcatcatgtaaccgttgcctgccaggtagaaccagttattatctacaaagagccactgattcgtaagcggtactccgttattctgacggtacatccagccgatctgatcctgtacccatccgccgctgatggagggtgttccggaagaaccgctgccggaagccggcggtgtgcctgtgtaaacattgctggagttcatatagtagtcatccgactcgtcactccactcgctcttctccccgtccgaattgctgatggctcttaccttgaaggagtaatcgcccgctttagtcatatacgggtagaaattgtatctttcattcgacgttgtaactgttgtcactgaagaaccattgcgatacagtttaacttcatacttatcagcgtcatcaatggtttcccatgtagcattcctgccgtcccattcaagttcatcgggaacctccagctcgccgcttaccttacgctgcttcacttcaaccctgagtcctcttccgctgtccagcctggatgcagatttgaattcgctccggttgcctgatacggaaaaatacttggaagaggtataggagaatctgtacttatctgctgcatctcctattaattccagctcgattctgataaccggagtctcgccgcgctcccactcatcgtcattggtattatggtactccacactgtctatccggaagtctgttccctccttgagattttgtgaaagagtgactttaaccgacggtgtgcctacactgtctccagcatccggcacttcactgttaacctgcaccttcacttttgtaatcttgtcttcggccgcataggcggtcatacacattgcgcatgcggttatcatcgccaatacaggcaccgccgctttcttcaggctacgtttcataaactttcctccttcatcctcttttaccttcgtatactgatttttttgtttgcatataccttattataccaaatgaattactgttcgtcaaagaatctctattctattttcagaaatttgacagtttttcattcatttattataataatttatatattttatctagctccgagaactttaaaattccgaaatttcggatgcgctcatatgacggttcagccatgatgcattccgcgaggtgttttcgctgtttttgcgaaaatcccgagttgtgcggcgcgacgcgatgaaaagcaaacttttcaacacaatcaacggcgttttttgccgtttctgtgcatcatctgctgcagtttgaccgaaggctgaactgtaacgcgcgcatcgagcagtacatcactaatccacaggaaaggaaccctaacccatgaatgattctaaaagccagaaaaacgaagttgtcaaaaacctttttgaaagaaaatcagtccggatattcgaagaccgtcccatttcaccggaagaccgcctcacaattcttcaggctgcctgccaggctcccaccgccggtaaccagcagctctatacaatccttgagattacagagccggccctgaaaaagcggctgtccgttacctgtgataatcagcccttcatagccgatgcgccgttggtgcttctgttctgcgccgactgccagaaatggtatgacgcttaccgttatgccggctgcacccccagacatccctccgcaggcgatctgatgcttgctgtcgaggacagctccattgccgcccagaacgccgtcactgccgcctggagcctcggcatcggttcctgctatatcggagatatcatggaacactgtgaactccaccgggagctgtttcagcttcccccttacgtcttcccggccgtcatgctggtactcggctatccgactgcccggcagcgtgaaagaacaaaaccggcgcgctgtcctctggactccatcgtgatggagaatacctaccgtaaaatggaccgtaacgctctgtatcagatgttctcccataagtccggccaacagtcctatgaagactggatgtctgccttctgcaacagaaagtataattccgatttttccagggaaatgggacgttctgttagggaatatctgaaagagtttttgtcttctgatcaaacggaacaataaggtgttcgatcccggaatttcctttattggttttatagtgtaattatatcagactattgttacctatctctaactttttgcttacattttcattaaatagagatttagttaagcaggtgaggacgccgccggtacggccagcggacggggtggtggggtgtggatatgagtctttcgtcccggggaagattgttgtgagttgggactgcgggcgaagataaaggctgcggagcacgctcccgctctgtgaaatgcatcgcgctgctaagctcgacaggacctcgctaatcagcgatggatttcaacggcatccgcagcctttatcttcccctccgccccaaggccaggttttcgccgggacgaaagactccgccaggggattggccccgtccactggcctgcggccgctgaatgtctcacgcgttaagtgcggggcggaccttgtcgcggccactaagagcttccgtgggcgggaaatacgatatgccttcgatgggtctattataaaaaattgtggaggatttgatatcagcctgccggaaacacgtagtggccgcgacagggccctccccatttaaggttggagacaatcagcgcccggaacggaccatgtccggtgccgcgaaaacctccgcctgagtcttccttccccggcgaaaacctgacccggggaaggaggcggaatcaattgcggaggggacatgggagtccgccggtgcttggcgaggttcctcacgagcttagcactgctgcgcactccaaagagtgcaaacggtccccgcagcaattcattccgaccggattccccctccacgaccaacttcccacgggacggaagactcaggcatccccctcatcccaccggacatggtccgttccggacgcgtcctcccaacctcagttaaatctccatctaatcgaaaatgagcgaaatgaagaccgtttaaattcttccggtctccattccgctcatttaaatatacaatttcatataaacatcaagtataaatatatctgcggcagggtacgccccgggacgaaagactcgtatacacaccgcactgtccgccggccgtgccggcggcgtcctcacctgcttatttaaaatatttcacaccggattcaaatatcttcatatcctgctcaccgtaaatattcacagccacaccgtcgccgcgtctctccgaatggcccatcttaccatagatgcggccatccatgctggtaataccctcaattgccatatatgagccgttcggattccattcttcgtccatcgtcggattaccggccggatcgacatactgggttgctacctgcccgtttgcataaagtgtattgatccactcatcacttgccacaaaacggccctcaccatgtgaaagcgggttcacatagacgcctcccagctctgcttcccggagccagggggatttattcgatacaaccttcagatatgccattttggaaatatggcggccgatgttgttcatcgtcagtgtcggtgaatcggccttctgcggctcaattttttcacccgggagaagtccgagtttaagcagagcctggaatccgttgcaaacacctaaaatcagtccgtctctttcccccagcagcttctccatctcctcctgcatcactgcattcctgaatacggttgcaaagaatttagcggaaccgtccggctcgtcgccggcggagaaaccgcccgggaacataataatctgggaacggctgattgccttcctgtattcctcgatggaatcacggatatcggaagctcccctgttacaaaagactttgacaatcacatcggcgcctgcgcgttcaaacgccttggtactgtcgtattcgcagtttgtacccggcataaccggtataaatactgttggttttgccactttattcttacagatatggatggaatccgtcttaaacagttcattccttacctctttctgttgaatacctgaacaggtcgggaataccttttcgagtgtgttagtccaggcattcagggcttcttccatcgtgattacggtattgccatattcaaatgtctctttatccgtcacttcaccgatcaccgtataggaaatggacagttcacccacttttccgtccggcacttcgcagacgatattaccccagcccggcgcgaagaagtcccgaggatctacattatgctcaattctgacaccaagtttattgccaaatgccattttgctgactgcctcggcggctccgtgtccctccaccgcataagcggaaataatcttccctgcttccatatctttatagagcttgtcatagccgtccatcacctggctgtatacaggaagatcatactgatccttctctattgtgaaaagtacaatcttgcttccggctttcttaaactcgggtgaaaccacatgctgcttatcggatatatcaacggcaaaggataccagtgtcggcggtacattgatttcgccgtgttcctcgtcgttaaaggtgcctgacatgctgtcctttcctccgatggaaggaaggccgaagccaatctgcgcattataagcacccagcaatgcggagaatggggttccccagcgtttcggatcctctgtcatgcgcttaaagtactcctggaacgtgaaacggatcttcttgtagtccccgccgcccgcggcaatcttagctacggagtccagaactgcatagacggcgccgtggtatgggctccagctggagagatacggatcataaccatagctcatcatcgtaacggtatcacagctgcccttttccaccgggagctttgctatcattgactgtgtctccgtaagctggtatttaccgccgtaaggcatgaatacacttgctgcgccgatagaaccgtcaaacatctccacaaggcctttctgggagcagacatttaaaccggacagcatcttcagccatgtttcttttacatcgccgatttcttttttctcaaacaaattgcctgtcctgaccggaacttccacagtgacggaagcttcctgatgggctccgtttgtatccagaaatgcacggcttaaatctacaatcgtctttcctctccagttcatcaccagtcttggcgactctgtcactacggctgccggaacggcctccaggttttcttccgccgcaaatgcaagcatcttatctacgtctttcgggtccaccactacagccattctttcctgggattcggagatcgcaatttccgtaccgtccaggccggcatacttcttcggaacagaatcaagatcaatcttaagtccgtcggccagctcgccgatggcaaccgatacgccgcccgcaccaaaatcgttacatttttttattaaagagctgacttccggacggcggaacagcctctgtaattttctttctgtaggaggatttcctttctgtacctcggctccgcacacctcaatggatgtctccgtgtgtactttggaggatccggtagctccgccgattccgtcacggccggtgcggcctcccattaaaatgattacatcgcccggatctgaagtctcgcggattacattctttctgggcgcagctgccataacggcgccaatctccattctcttcgcaacataatcaggatggtaaatttcttttacatagccggttgccaggccaatctgatttccgtaggagctgtagccgtgtgcggcatccgtcacaatccgcttctgtggaagcttgccgtgaagtgtctcggacatcggcctggtaggatctgccgctcctgtcacacgcattgcctgatatacataggtacgccctgacagcggatcacgaatggctccgccgagacatgtggcggccccgccaaaaggctcaatctccgtcggatggttatgtgtctcgttcttaaagttaacgagccactcctcttcctgtccgtcaatgacaacaggaaccacaatgctgcatgcgttaatctcttccgattcttccagatcctcgagttttccctctttgcgaagctttctcattgccatcagagccaagtccatcaggcagacaaacttatcatcacgccctttaaagatttcttccctgtcagccagatactgacggtaggatgcctcgatcggctcattgtaatcaccatccgtaaattccacattcttaagctctgtctggaatgtggtatggcggcagtgatcagaccagtatgtatcgagaacccggatttccgtaacggacgggtccctcttctcttcatttttaaaataattctggatatgaaggaaatctttaaaggtcatagccaggttcagggagctgtaaagctcacccaggctgtcctctgcaaaatcacagaagccctcaaaaattttaacgtcttcaggctggtcaaatacagtaacgagcgtggccggtttcggattattattctccctggaatccaccgggttaatgcagagggatttgacggcctctgcctgctctttcgtcaaggttcccgaaatgacataggtagtagccgatttgataaccggattctcttcctcattcagaagctttacacattgttcagcagagtctgctctctgatcaaactgcccaggcaggtattcaacggtaaatatggtatctccctcttcagacggaaagctttcttcatatacaaagtccaccggcggctcagaaaaaattgtaaccagcgcctctttataaacctcttcagatacatcctccacatcataacggattaatacgcggacatctgtgattgtgccgatccccaggtaattttcgatctcctggcgcagttctttcgcccttacggcatattccggtttcttctcaacgaaaattcgtcttacactcattaaagtacctcctagtttttctgctggcaatttctattgacactgcatatattgaaaaagacagacgccttctgtcagtcatctgccttaatcatacacaagttttatagattagtaaaattaatatatctaatattttttattaacaatacttatttgttttcccgcttcggatggccggtaaatggctggtccggttcagctccagaagtgtgccaagcccggtgtctttttcataatctatgaccgtgatactggcattcctgacaataatctcacgcttttctttctggtttctgagaaggtagtcgatgagatagacaaggatgccgccgtgggctacgattaccgcattgccgccctccgtatccctgagtacccgttcaaccgcagaccggctgcgcgcgcggcaggacagcctgctttctcctcccgtcggcgctgccgcggcaggattcatctcccaccgcctgtaatcatccggatacttttcttcaatctccttccaggtacagccctcccacagtccgaaatccacttccttaagctccggcagcacagttacaggcagtcccattttccctgccacaatctccgccgtctgtttggccctgagaaggggacttgaaaagagtgcgcgagcctcacaatgctccatggcctttgccagaaatccggcctgttccataccgtcctcattgagcaaaacatccgtctttccctgtatttttccttctatgttccattttgtctgtccatgacgcagtaagtaaaatttcatatcccggctgtccctactctccgctgacgctcatcgcatccagggtcagcttcatgatatcttttatctcctgctccgtcatcttcatccgttcggccagttcttccaccgttgcctcgcgtccgagttcttccgccatccctgccgatatatcctttaagacattgacacgtgccagcatctcctcctctaccttatattccgtattctgaagctcaagagcgtcttctatcatccttcggatgcgttcctccgactggctgtcaaaatctcccccttgtattcctgcgccgtaagaagcagggcgatattcgcctcctgcaccagatcgttcatcgacaggccgcgatccctgtattcttccgccattctgaccgcacggcccagttttccttccaccagccgtttcacggccgactggcttcccgccagtatctcgtccagcagtctttcttcctcttcgggtgaacatgggggaactagtttcagttcttccagataaagctgatagaaatcttctcctgatgtaaattctctttcgtcaccggaatcaccggctgctaaaaaatccttcaagctgtcgtttgccatgttatctgtttccttcctcatattctgtgtcaggcatgcagccgcctgattattttaaatacaatagccctctccatcaccatcggctgtgagtgggcaaaaaacacaatgccgtccgtcggagccagaagccggcttatcacctctccgctccccggctcaatgattgtcgccatcaaatcacctctgaggacctcggcccccggccaggtctcccgtctgaagaatccggcccggtctgtctttacattcgtcaaatcctcttcgcggataacactggcaatatatccgctgtgactgctgtaacggataatccccattcttgtcagaaagcgcagcacgctggatgcggcctgcctggccgacggctcattcaccgcttccgtggaggcagaatacacggtaaatgcgttcgttccattcatctgccagttataattcaaagtcgccgtatcatagggcgtgggtttgcgcattaccacatacggcagcccaaagagatttgcgaggcccggattgtgatatcccgtctccatcattctcacatgtgggacatagtcccctgtcatatagagactgccaaactgtatcccatatccgtaatccttcactttatcaaaaactccggcagccagcctttttgtcgtctcgccggttgcatccccaggaaaaagccggttaatatcggaattatcggtagaccagaaatgtttcccgacgttcatggccggataattgacggatgggatcaccagaatctcattatcccccacgataccgccgtgcagctcaatatccttgagcagcttgaccagcagagaacagatgtagagctgctgtacttcatggccgcgcagcgaacccacgatacaggccgccttcactccgtttttaccaaaacggtatccgtatatattaaaatcatccctgtggatgttcttcatagaataaatcagttcctgtctcatcggccgccacctcccagaatcctggcaatcagagaacctctctccaccatcggataggccctcagtgtaaagattaatccgtcgcagggagcatacagccgctcttccacagttccctccagcggattgacaatctcgccgattatctcacccttttttatatcattcctgtgtttaacctttggtacgaagaggcctgatttttccgcattgacaaaaccgacttccccgcccagggagaccaccggctccttcggcgtaatcaccggcccgtcccagattcccaaatccttcatcaggcaaaagataccgtctacgagctgaaaacagaacttctccgtgattctcatgccgacccccatctccacaacgagagttgggacgccaatcatgttcagtgtatgggcaagcgttgattcgagtactgtggacgcgtgatgcacccagacaaattccgtgttcagtcgtccggcatatttaagaaggctgccggaagtgctttcattaagacgcacctgcgggatttccctgatatagatattgcttgcatggacatctatacacatatcggcgccagccaggtctttgacaatcatcccggcaaccagctccgccacagagccgtcgtccgtccccgggaaaatccggttcatatccacgtcaaacacaggaaatgcccttgtaatcgtatccagccccagcggattcagcgccggataaatctcaaccgttccctttaaataatggatctgttcccggattcttctgttcagttcataacagacgtactgtccctcaagctcatcaccgtgggttcccgtcaccacacaaaaccttttttcactgcctgtcacctgttccggagtgataacgttcttccggattaaaagtttttcatttacaggcagctctaaagaagctactgtctttatcatctgcgttttcctctgtatctaaatgctggatctgaaaattcctcttcggaatattctatcaaaaaacggcaggatagtaaagatgaagatttagttaagcaggtgaggacgccgccgcaggccagcggacggggtggtgaagtgtgtatatgagtctttcgtcccgggggatgattgtcgtggtttgggactgcgggcgaagataaagtctgcggagcacactcccgctctgtgaaatgcatcgcgctgctaagctcggcaggacctcgctaatcagcgatggatttcaacggcatccgcagactttatcttcccctccgcccccaaggtcaggttttcgccgggacgaaagactccgccaagtgtatcggccccgtccactggcctgcggccgctgaatgtctcacgcgttaagtgcggggcggaccttgtcgcggccactaagagcttccgtgggcgggaaatacgatatgccttcgattggtctattataaaaaattatggaggatttgatatcagcctgccggaaacacgtagtggccgcgacagggccctccccatttaagggtagagaccatcagcgcctaacggaccatgtccggcgtcgcgaaaaccttcgcctgagtcttccgtccccggcgaaaacctgaaccggggaagtaggcggaatcaattgcggaggggacatgggagtccgccggtgcttagcgaggtccctcacgagcttagcactgctgcgcactccaaagagtgcaaacggtccccgcagcaattcattccggccggattcccccttcacaactaacctcccacggggacggaagactcagccagccccctcaccacaccggacatggtccgttccggacgcgtcctccaacctcagttaaatccctatttacttcctccggctcatatgctaaacttggaacagaattataagggggactaataaatggacataaattatgaactatacaaagttttctaccacgtagcctcaaccctcagcttttcggaggcatcaaagcagctttttatctcacagtcggcagtcagccagtctattaaggttctggaaaaaaagctgaatcagacgctttttatccgaagtacaaagcgcgtccagctgacaccggaaggcgagattctgctaaagcacatagaaccggccatgaacctgattaaaaagggggagaaccagcttctcgaggccaataccttaaacggaggccagcttcggattggcgcaagcgatacgatatgccgatattttctcgttccctttttaaacgaatttcacaagatgtatccgaatattcatattaaagtcacgaaccgcacttccattgagtgcgccaggctgcttgataacggacaggtcgattttatcatcaccaattatcccaactcagggctgtccaatacgcagaatatacaggtcatccatgatttttccgatgtatttgtggcaaatgaaacgtattttcccctgaaagacagaatgatcacactgaaggaattgcagtcctatcccatcctgatgctggatcgcaaaagcactaccagcgaatttctgcacagcatgtttcagaagcaccagttggatctggtacctgagattgaactgagcagcaatgatctgctcatcgatttggcgaaaatcgggctggggatcgcgtttgttccggatttctgcattccgcagcaggaggaaaatttcttcattctcaatttggaagaaacgcttcctaagcgccagctggtcgtcgtccacaacgaaaccctcccaatctcccaggccgccaggcagttcattgagcttcttgagggaaactcggacagggattagaggcggttccagaagttttccagttcctgccgcaccgtcttcagggtcacgcggcggcagtcgtcccactctctcggaaacagctcgcggtaatcatttcgtaagaaccggtcgtccagcagcaggatgatgcccttgtcaccggcggtgcggatcacgcgtcccgccgcctgcatgactttattcatcccgggatattggtaggcaaaggcaaatccttcctgttcctcctcgtcaaaatatcctttcagtatctcctgctccgtacagaccatggggaggcccgttccgacaataatagctcctatcagcctttcttctttcaaatcaatcccttcggaaaacagtccgcccattacgcagcatgcgacaagggaattctcccgttcctgttcaaactcttttaaaaaatcttccctctgcgcgtccgtcatcctgttttcctgcaccagccagtcaatcccggaatcctgcaaatatagcttctgcgcatccgaaccatccgcaaaatccggccgccctatccggccgtcgtataacagctccaaaacatggttcatgtattgataggatggaaaaaaaacaatataatttccttttctggcctccgcggcctgacggatataatccagtatcttccggtattccgtacggtttctcctggtataacggcttgtgacatcggcagcagccaataggaggcggtgctcctgtgaaaacggtgaattaacatataccgtgtaatcttcttcatcattgctcaaaagctgcctgtaataccgtatcggcagcagtgtcgcagaaaaaaagaccgaactgttcccctgggcaaggcattccccaatatgcacaatcggattcacgcagagcagctttatcttaaaatcgccggactctgtcaattcagtgtaaatgcggtaatgttcgtcgactctttcataaatgttcaggaaattgcggacggtaaaatagaaatccagcagctcttcccgtccctcacttcccttatattcatccatgtatttttccagctctgaaaacagggaggtcagagccgtcaccagatgatccacatcgggcaggatctgccatccctcacactggcgtttcatttccagacaaatcttgttgacgcgttccagctgccttgtcaggcgcggtgatttatcttttacaagacgttttgctgccagcacatcctcttttatcagaaccgcgctgtacatctccctcgccctcggcaccagattatgggcctcatctatcagaaaaatatactcccccttcgccccatccgcaaaatagcgtttcaaccggacatccggatcaaacacataattatagtcacagattattccatccacaaagctgctgatatccaggcagtattcaaagggacagaccttaaatttctccgcatatttaagaatgacttccctcgtaatcccaaactccttatggacaatctcatacaccgcatcatttaccctgtcaaagtggcctttggcatacggacaggcatcgggattgcactccggtttttccaaaaagcagagtttatctttagctgtgatggttactgagcggaaataaagcccctgctgccgcagaatcgcaaatgcctcctccgccacgcctctcgtaattgtcttagccgtcagataaaaaagtttatctccatgcccctctccgattgccttcaggctgggaaatacggtggatagtgtctttccgattccggtcggcgcctggataaacagctttcgccgcctcgcttcagtccggtatacactgaccgccagctccctctgcccttcccggtaagggaacggaaactccaaatctttcagagactcatcccgtctctgggcattgtggtaaagatatctggcccacttcacatattcatggatcagtcccataaaccattccttcaattcctccatggttttgatgacctgaaaacgtcttacctcctccgtatccagattacagtatgtcacctggattgtgagttcttcaagcccctcgtttaatccgtagaaataaccatagcacatggcctgggccagatgcacctccaccgcctcttccagaacgctgatatccatgtaaacgccctttatctcatcgattgtcgcccggtttccatccctgataattccgtcggcccggccttccaccaggatttcgaagccgtcctcctccacactgcatttcagcggcacctccgccaggtagccggaacccatctttttctggattttgcggtgcatacggcctcccgccagcattgcctccttctgatccacagccgtccttctattatctaaatcgccggagcgcaggacaaattccaccaggttgcgcacagaaacccgtatctgttttcctttcatctccatctgtccttctccttccgactcttatgattcccttttatattttataatatagcgaaaagggatcgcagtctcctgcaatcccttttctcaattgtatgcaaattttttaagcagctgtgacagcctttgccgctgtcctatctagaaatgcttcaaattctttattttccccgctatattctactgtcaatactctggtcaaatcgaggctcataacgcctaatagagatttggcgtcaatcacgacgcggttgtaaaaaacatctatatcgaattcgcatttcgttgcagctgctacaaaatcttttgcatcttctacagtacctaacattattcttttctgcttcataatcaaaactcctttaactggtgcaacttattgctgattcaagtattacttatagcaccttatgcaaaatttgtcaaattttctttctaaaatctggaaatcggctcttgtaaattattgacaattttacattctctattcagaaatttatgatcgtttttaccagcacatctactttcgcagctttcgtttattagaactgttgtaaagattatttttgataaggtgtgcagttcgcctaaatttataagattacataaaatttccagctaaacatacgttctcattatagtatataaccttgttccgtgcaatcttttcttcgatatttccttttctttcctgtgaggacgccgccgggaaggccagcgggggaatatgaggcttccgtcccaatgaccgtttatctccttatctctgatgatgaacaagcactccgccgcctacatactatataaagaggaagtaaatagtatgatcctccctgataaaataaaagaggtgatcttatggcatatgaccagataaatcccaacggcagagacaagattccacgctccgcaagaagcacggaacctgcatgggtaacgaccgtggctcttcctcccgaagcggcgccgtttgacctgcaggccgcaattaacgcagccggcgacggagaaccgacggtcatcgaactgaacagtgatatcatactcaatggatacgatattaaaataccacaggataaaattataaagcttacaagcgccggagcagaaatcacccattcaattgatgccaaccggctttttcgggtactcagcgtttcgtcccaagcggcgctctttttggaaaacatcatcatcaccggaggcgttggaaccgacagcggggccggtgtatcggtttttggcggcgcgcttgtcatgaacaacaatgccgccataaccggcaatcaggcttccggagccggcgccggagtactcatccggaacggcggtacattctgcatgaacggcggtgaaatcaccaataacacggcagggactgaaggcggcggtgtcaataatggaacgggcggtatctttctgatggccggcggcatcatatccggaaattcatgtccgcttatcggcgcatccagaggcggcggtgtgtttaattccggtatttttactatggaaggcggtgaaattttcggtaactatgccatcatttccggcggcggtgtattcaatgccgcgtatttcaccatggaagggggtaagctctgcggcaactcttccggagggaacggcggtggcatttataatgccggcagtgaaagaagcttatttatagcgggcggagaaatttccggcaattttgcagcgggcagcggggcggcatttatatgcatcccgtggagggcaccgctcccctgataaccgtcacaggcaaaagcctgatagcggacaacatggccggtcatgacggcggcggcatctggatcaccttcgggcagccctgcaggctggagattgggccggacacggtcttttccggaaacaaggcttcccgggcgtttaaccgcagccctgccgacgtcggtgcctgcagtgaccatattgctgccgtccgctggacatctccgtttccgcagggatacaataactatgatatcagttatactaacggcactcccttcctcttcccggcaaaggttaccatacaggccgatcaaaaatcggtaagccaggctctccccgccggacggtttgcattcggactgtttaacgggaacggaagccggattgcctctgctgtcagcgatgctgccgaaatgattatatttccctccatcacaatcacacagaccggaattttcaattattcgatacgtgagctgacgcaaaacggcacctggagcaatgataccggatatcctgtaacaattacggtcactgaaaatggaaaaggacagctgacggcaaatgtctgctatcctgacagagcgccggttcttaccggtacattcaggcattccgttccaaagcctgtaactgtcaggttccatgcaagaaagaatgtctgcggagcctgccagtacgccggccggttcacctttggccttttcgatatcaaagggaagcgtgtttccactgcggtcaatgacgcatgcgggaatattgcatttccatccatcacgtataccaaagcaggtatttattactacaccatccgcgagctgacacagaaaaacggccggacggcggacagcaccgttcacccggtaaccgttaaggtatgctccggccagggccggctgactgccgatgttcagtacccgggcggcctgccctgcttctataagctgctgccgcatgccctgccgttttaacggctggtaatgtacggcaggaatctgaacccgttatattcctttgaacattaaaacagggagcccaaacggtaaaactgatcggctccctgtctttcttctccacgatattctctaattttctttatttttactctgcttgctccggttctctatttcactcttacaatatgctggcagtaaatataaagattttttatttttactgcctcctgaccgtcatctccaagcacgatcggctgggttcctgacggagtaaaataaagtttaaatgcaattgcatcctggccgatattaagcctctcctccggctcatacggaaactcccggcatgaaagtcccagatatgaatacattacccgctccagctcagggtttctgaaaacctgaaccacatcctcctcggcctcgcctttcatctcaatgattgctttggcctcatcaaatttcaaatttgtgaagcggtattcgccgtttcccagaatataggctaaagtaccattatcaagcaataataaaggatctgatttccccataatttcttcctcctccaccatatgtactgcaaactgtatttatttataatataaagaatgcatgataaagtcaactcactgtcaagaacgtaacaatatctccatcgtctgttccagcctctggcggctcaggaacaccccgaccacgcctgagaccatgctcaaaacgttaatctcttccaacgtccagacacgtttttccccgcactggtcaaagccgatcaatcctcttctttttttcttttccactaacaggcactggagcatggatacgatatcctgtgacgccagaacgtcttttgttcttccgctcagatttccgatatcacggcaataaaatattccgttttcatcaaacagctgatcataccggttcccgtccgtgtattcaacatcctgaagaaaatccttctgaggctttacgccgtcattacaccattcaaatgtgttggagcagagcctgccatcctctgaatcctcaaatatataaacccggctcacgccaaactggcggccgattatctccagcacctgggtaatagcattcggtatgtcttcctctttttgcagtaccccgaacacatactccgacagagtctggttcctgtatctttcctgcattcttatttcaggagcctgctgtacatagcttcgtccggcattgaattctgattccagtatggaatgataaaaaacacactggtttttccccttttctttcgccttgtaaagagccagatccgcatttttgtataattttttataatcattaccatctagaggggcaaacgccactccggcgctgcaagacagcatataaccgtcccgttccaggaactcctccattttctcttttatctgttcaaatttatcggctatcacgtcctgggagcgggccccggcattatgataacaaattcatcgccgccaatccggcctacaatgtcaccggcacggaaggtccgcttaagcagtacggcaatatccgaaagcagcacatctccgctcagatgaccgtaaacatcattaatgtatttgaaattatccaaatcaataatcatgaatgcacagggcgaatcctgcattgctttttcaatgaacttgcctcccagctcctctgccgccgccttgttgtacagaccggtcagagcatcatagagcgccttttgaaccagcatatcgacatttcgtttctccttatcgatatccgatattactccgatcgccctcttcctgccggactttcttgtatcctgcaaagctattctgactctgcaccaaagataatgcccgtcattcccggcgattcttatctccatctcttttaccggaacatccatcttcatatcccgggccgcattcatcagcagatgtatatcatcagggtgtacatggctgaagggagccatggtgctgacattctccgtcatgggagaataaccgaaggttttcacccagttgtccgaaaagaatatccggtcatcagacagatcccactcaaaaataatatcattggtctgctccattataatccggtgcttttccaaactcaggtgcaattcctcaagaatcttccggttctctgtgatatctgtcaaaatacagtagaatactttctttccatcccgctccaccagctgtccgtgatccagcaccgttaccagccttccgtcccggcatctgactctgtactctatcttctttgtctttccctgtgccatctgaatctgtacagaattccaggtgctttccagatcttccgggtaaatcaggcgccggaactgattatggaattcctgttccatctcttccctgctatatccgaacatatttaaaaagccctggctgtactggagcagattcaattcttcattatattcacagcatatgactccgcccggtacattctccatcaatgcatttaaattctcattcttctctttcagcagcttttcctgctcttccagccggcgaaaaagcgccctggcatgctgctgatccattgtcctggggaaaatttcatcctcgagctgattccggcttccttccgacatatgaacctgcagaaccctcagctcaccgttttgttcccttaccaccgcagtgacccgaatcttcagcttatcaaaaaacgcctctttaccggactcctgaatcaccagtttttctgataccgcagcagtacggggatccaatatttttatatcatactcttcttccaatatatcaaaaggacttggatacaattgatattcctgttcaaaaaatctttttgcaccggaaatgccacggccgctttcttgctgtcccgttcctatccattccacattttcatccatgccggataatactttctgtacatcgcgctctaccagatatgctctttgaagccggcagacaaattcttttactctgttttcaaacaatatgtccatgcccccttttcccccataacatttcttaaattaagcatactggaaaacatggatcatgtcaagaaagcatcattgcacctttgctgcattttgaacgaaaatcccgagtttcacggtgcgtaacggcgctttttggcgggatgtgattgactttgaaaaatacttatgctaaaataatgtcgcttgtcagaggacttgcaatcaaatagattgttgaagtgggataggaccttttagggctttatcccgcttttcatatagcggggtaaagccaaaaaggccttatcccgcttcctttatggaggtatctttatgaacgcaaaaataaaatccttaattggctacatctttccggcattgggcggtttgtttgtaacctatctttacaacgttgttgacggtatctttgtcggtcagggtgtcggttctgcggcattgggcgcagtcaatatcggcgtaccttttattacgtttgttgttgcagccgctgcaatgtttccgatgggcggtgccacagttattgcaatcagaatggggcgggggataaagcgggtgcaaatcatgcttttatgactgctttctcattaaccatcctgctttctgcattgctaatggttgtgggcatgacatgttccatgcagattgttgatctgagcggtgcaagaaaattgagcgcaaaaatgcgggaaatgtctgcacaatatttattctattattcagctttctccattcctatgcttatgtctacctgtctttctgtttttgtcagaaacgacggctcaccggccctttcctttgtgggtatgtgcgcaggtgcggcagcaaatatttttttagactggctttttatctttccgtttgatatgggtatcattggcgcggcggtcgcatccggtttaggacagatgttttccgtcctcgttttgttatcccattttgcgctgaaaaagggcgtacttcggtttaaggcattcagaattgattttacattgatcaaaaaaatctgtaagcgtggtgtgccggaggcagtgacgcagcttacaacgcctgtcacagcattttgctataacctcatgctggcaagactgattggagatatcggtgtttcaacctttagtgttttgagtttcatttactcccttgcaaatgcaatgctttccggtgtggcgcaaggcttgcagcccctttggggcatagttacggtaaaaaggatacagaggaaatgggctggtattttcgttgcggaattatcattaacagcattttatctatcttgatttatggaatgttatttttctttaatgaacctattatctgcatttttaaccgggacgcagaccttgtgcggacagcttcgtcagttcttccgctgtttttcctgtcccttatcccaatggcactgaacttgatttatacagcgttttttttctccaccaagaggacaggtgcggcaaattccatagcgattagcagaggtattattgtgaaagcacttgccattttctgtattcccgcgctctttggaaaagataccatatggcttgcaccatttgctgcagaaatcgtaacactcatgttcgcactaaaaatccgtaagggactttgcaacactttcgatttttagcaggacatttatccccttgaccttcagtcctaattcgtattatactatatgaggtacgaattaggattacatattaccaaaacgggaggtcataaatgaaagactatcgggaggaaatcaggcggattatggtttctgtcaacgtgattgacggaatctatgctatgggtgcaaagaaaataggcattaaagacaattctctctctttgctttatgcgttagatgacgggaaacctcattcgcagaaagaaatttgtgagcattggcttattccaaaaacaacgcttaacacgatcgtcaaggaatgtgttaacgcaggctatattgtcttagatggaatcaagcacacaaaagaaaaagaaattcgtctcaccgataaaggacaagaatatgcaaaaacaattttgaatcaagtttacgaattggaacgacgggctatggaaaagacactttccagttattcgccggaattcgtacaggcattagaacaatttacagcttatttgaaagaagaagccgaacattttagctatggagagtgaataatatgaacaagacagtcaaggaagagatttttccttaccacatacgagatttgacaacaaatgatataagccaatacaacgcattactccgttatgcttttcaggtaacggaacaggatttaataaatgcgggctggcaaggtgatgaaattaagcaatcaaaattccctgtattagagcgtgccgatatacttggctgctacgacggtgaaacccttgtttcgcaatttgctgtatatccccttaaaatgaatatctataatgaaatctaccccattggatttgtcaccagtgtttccacctatcccgaatattccgggaaagggattatgtcaaaattgatgaagaaaagcctctcacgcatgagggaaaaagggcaatcgttagcgctgctatacccatattccattcccctgtatcgaaaatatggatgggaaattatatctaacaagatttcttacattattaaggacaggcaaatcccctcaaaatcaaaggctccgggaagcgttcaccgtgtgagctggaagaatgaggattttatgaagctgcatacgcagttcgcaaagcaaacacatggctgcctgttccgtaatgctttagcctgggaagaatattggcgatgggattatgacgatacagtagtcgcaatttattacagcgtggagaacaaacctctgggatatatggtgtacctaattcggaatgacattatgcatatcaaagagatgatatatctcaaccgggaagcccaaaagggattgtgggagtatatacacgctcacgattctatgattgacgaggtgcgtggaaatacctactttaatgaacccgttgcctttgatatggacgatggagatattaaagaaaccatacgcccatacattatggggcgcattgtagatatagagaagtttttttctcattatcactgtgaccctttggaaaagaatgtatgtatttcttttgaaatcactgatcatgtattggattggaataatcggacatttaacattctattcaacgaggggaactgttcactgacagagcaaaaagccgattgccacgttgccatgtcgattgccactctaacggctttgttgctcggctataaaacggtgttacagctttaccgcacggagcgtatacaaggggacgaacattcagtgcaaagactggacgatgtgattttgcacgaaacaccttatatttcagactatatttaattctttaaaagatttgttattttgtactgcgattagagcaactacaaaaccgttgtttggcggtaatacagtctatccgttccacggcggttttgaaaaaaacaatcaaagccgccgtttctaaattaatcggctaattagtatctgagtctaattctcctcttttcaaaaaggaaatcgaagtggtaattaaaatctgcttcaccgctcccgaagcaggcaggaacatttgttcggcacaagtgcaaaaaaataatttataaaacttattatatctaataggctttataaattatttttatcacacttagaaacttctcttttgctctccttgaaaaccttgatttcacaagattattcagcaggggaagagggattcgaacccccattaacggttttggagaccgttgctctgccattgaactattcccctaaaattgcctgcccaagtataataccacaggacaggcagtatgtcaatcggttttttccaaattacaaataaattgttttaattaatgaaattattgtaattgtttcgctcaacgtaacaatattgcttcttaaccgcctgtcctggagttaaatcaggttgattgcctctcttacattgcttaccccgccagctcaatatcgtttctttttttcagcttttcaaagcttacgagcggcatgatgcagcgtgtgaagcccagcttcaccgcttcgttcactctctgttcggccattgatacggcccttacttccccggatagaccgacttcgccgaatatgacggtcttttcatcgaccggtctgtctttatagctggaaatcagtgccatcacgatggccagatccagcgccggttcattcattttcataccgcccgcaatgttgacataggcatcgaattgggacaattcataccggcaccttttttcgagtaccgccatcaggagattcacccggttataatcagttcccgctgctgttcttctgggcattccgaagttcgtctttgtcaccagcgcctgtacctccagcataatcggcctggttccttccaatgaacaggcggcaacggcacccgaggctcctgcgggcctgccgtccagcatgaattccgatggattctttacttctgccagcccctcctccctcatctcgaacacaccgatttcattcgtggagccaaaacggttcttaatccctcttaatatccggtaggaagcatggcggtcaccttcaaaatagagcaccgtgtccaccatatgttccagtaccctgggtccggccacaaccccctcctttgtcacatggccaataataaataccataacgcccagacccttggcaatctgcatcaaaatattggtgcattccctcacctggctgacactgccgggagccgaagtaacttcctccatatacatggtctgtatggaatcaatcacaaccgcatccggcattgtccgtttaatcacctcttctatggtccccaggtttgtttcacacaggaaagaaagggggcctgtcaccgtcccgattctgttcgcccgcagctttatctgtttcagggattcctctcccgatatgtaaagtattttctggttctgtcccgccagattacggcaaacctgcagaagaagcgtggactttccgatgcccggatctcctccaaccaatacaagggagccccttacgatccccgagcctaaaacgcgatccagctcatcaaagccggtccgtatccgatcctcctcgtccagcacaatctccgacagcatgacaggcctggccgtatcggcggataccttccgggcagagccagtcccgcctttaccaacggtttttatctgggagaccggctcctccaccatcgtattccacgacttgcatgccgggcactgtccggtccatttcgccgactcatagccgcaatcactgcaaaaataagctgttgatttcccttttgccattctctcctccgtaaataaatagtcgccgacatcagaatggaggcaaatctttcgaccgcctccatcctgtaattctgcttatctctatcttcctgcaattcttatctctgttcttacgccctcgttcagttccacgcttaaaacaagttttccgcttacgttggtcgtcatgcctcctacggcaatcccatcaatgaaaacttcatattcacgatcatcttcaagctgaactgtgatctgagcatcctggtttccttctacagcaaaggttacctcggaatcatcaacagcaaaatggttaactgccgttcccggtacggactcataaacaaacattccgttcctctccagttttgttatctcatgaaaggtttttactttgtataaatctcctttgtattcaaaatcctgaagtttggactttgtcgctaattcataattgccaaaactgattgtaccgtcatcctcgatgcggattaactcgctaactactggcataaatctatcctcctggtattcttctgtgtgtttccctgtgtaggattattctatcacagtttcttttacttgaccagtattttattctctttggaagagtccctgacggtaaatttaaggccctcccgtctctggttacaagcacttcatcgtcctttttaatatgcccctccagcagttcttctgagagcttatcctctatctggttctggattgtccgccgcagcggccttgcgccgtatttctcatcgtatcccttctcagccaggtatgcaaccgccccgtcatcgacagtcaggctcatgccgacctgggctttggttcttctgataattgttttaagcataattccggcaatctcttcgatattcttcttattgagcggatggaataccatgatttcatcaattcggtttaaaaattccggtttaaacatccttttcacttcatccatgacacggtttttcataaactcgtaatccgtcttcgcatctgaatcggaagagaatcccagacgcttcggtgaaatgatattctcggctccggcattggatgtcatgatgagcacggtatttttaaaatcgatctttcttccctgggcatccgtgatatgaccgtcatccagtatctgaagcaggatattgaatacatcgggatgggctttctcgatctcatcaaacagaatgacggaatacgggttgcggcgcaccttctcgctgagctggccgccctcctcatatcccacataaccaggaggtgagccaatcatcttggagacactgtgcttctccatatactccgacatatctacccggatcatcgcattctccgtaccgaacattgcctcggacagcgcctttgacagctcggttttgccgactccggtgggccccaggaacaggaaagaaccaatcgggcgcttaggatcctttaagcccacgcggcccctgcggatcgccttagaaacagcggttaccgcttcttcctggcccaccactctttcatgcaggatcgattccagttttaagagtctctccgactcctcctccgccagctttcggaccggaattctggtccagtcggatacaatatccgcaatctcattgtcaccgaccaccagcttccgtgaatttttttccttctgccacttatcgcggattttttctatcttttctcgttttttatcctgtctcttttttatgtctcccgccttttcataagcttccgccttgatggcgtcttccttctggcgttcgagcttcttaatatcctcttcgaggactttaatctcttccggctccgtgtaaacggtcagacgcagcttggaggatgcctcgtcaatcaggtcaatcgccttatccggcagaaaacgatcgttgatataccgggccgccagcttgactgccgcctctagcgcctcatttgtgatcgtcaccttgtgatgctcctcataccggcttctcagtcccctgagaatctcgattgaatcctcctccgaaggttcctctaccataaccggctggaaacggcgctcaagagccgcgtctttctctatatatttgcggtattcttccactgtagtggctccaatcagctgtatttcccctctggccagcgacggtttcaggatattcgaagcgtcaatggccccttccgcccctccggctccgatgatggtatgaatctcatcgatgaagagcaggatatcaccgtcctcctttacctcggacaagactttcttgatacgttcctcaaattcacctctgtacttggaacctgccaccatacccgacaaatcgaggctgacaactctcttctttgcaattgtctcaggaacattgcccgatattatgagctgcgccagcccctccacaaccgccgtctttccgactcccggttcgccgatcagacagggattattctttcctcttctgctgagaatctggattactcttttcatctctgtctcgcgtccaatcaccggatccagttttccttctttggcaagctccgtcaaatcccggctgaagctgtcgagattaggagtattacctttttcttttctgagtctgccggccgcttcctcccggcccgcagggacatcgtcccccatggcagccatcagatccacgtataatttttgaatatttacattcattgtattgagaaggcgtgatgccgtgcatttcccttctttaatcatggcaatgagtatatgctccgtccctataagaggagctttaaagaaaacggcttcctcataacttgcctgcagcactgccctggctcccggtgtatactccgcctgatctgctgttctcgttggcacggccggtgaaatcaggcgttccatcagctccagaatcttatcttccgtcacatcataccgctccagaatggcagcagccacaccgcttccttcctttatcagtccaagaagcagatgctctgttcccacatagccgtgctccagctcctctgctgtctccacagccaggcggattgcctctctggctttctgcgtaaaacggtctatcataaaatgttcctcctgcatattcattactgctgttctctatcagttactgttcaaacgggagtattcctcgtgttattgatcgcaccatactgcttttgggcgtagtgcgaacagcaaccttcatcatttaagctccggcaggtgttccctgagatatctgcccctagccacttcaagctcatctttgccgagaggctgtctggaatacttctgaagatttgccggctgaattcctatcatcaggttataaatgcctgcgaactccttcgtctcaaccaggccgtccgctatcccggccctgagatgggacaggaaggtcatagcctccttcatggaaagctttcttgcgtatttcaggactccgtacgatttatatacttcatcttcacgcaaaagacggtgctttgacagggaagcctcccttatctcccgttcctgctgggaaagctgtacggctacactgctgacaagctcgatgatttcctgttcattcatccccagcgttttctgattgtaaatttcatagagatctccataattctccgttccgcggccgtagactcccctgaccgtcgtcccgaatcggctcatatctcccagaagatcctgaaaccgcttgctggtagaaagagaaggcagatgtactactaccgatgccttcattccggtccccacattggtgggataggccgtcagatacccatatttgctgctgaacgcatatggaaattttgcattaagataatcatccagtttatcagcttcatcatagcaggacttaagctccagtcccggagccaggatctgcagacggatatgatcgtcgccgttcagtacgagacttaccgcttcgtcatccgaacagataatacttccgggagttttcttctccaccagcgtcttattcagcaggcggcgctccctcagggcgacgcggtccagttcttccatcttatccaaagccctgaactcataccggcggccgtcctttccctggatatctctcaattcctgcatcatccgccctaccatgtacctggcctcattgtcctcaagcctggaggggaatttatactcttcccagtttcttgaaagacgcacccggctggatacaatatttgacggatcattctttacatcttcaaaccatctcgtcattcttttcagtctcctcttttaaggcctttattctgtcacggcagactgccgcttcctcatattcctcagctttaatcgcagacttaagccttctctccagctgcttaagctgctcctctgtggaaaattccatgacaccgccgctggtaacggctgccgtccctcctgccggccgaatcttcggctgtttacccgtatggcttgcgctctcctgtaatttcttaatcttctctcctatcagcagatcaaagacatgatagcagtcggcgcagccaaaacggctgttctcgacaaactcctcgtaagtggtcttgcaggtgggacaggccacctcatccatcttctgctgccgcgcggcagacggctgaagccccagcaggcttgacagcagcttgccgagtggaaattctccttcaattatagcggaataggggccgaaatccatctcctgcgcacactgtgaacacagattatgctctgtcttcactccattcattacctctgtgtatttgatatttgcttcacgaattctgcatttctcacataacatcttcttatcctccatgaaaaaatgccagcctttacccggaaaaagcgtcaaaaatagaatctaccagccgatgaacctcttcacggctcacattcttgcaggctcccctggcaagaataacgcttaaatcacgctccatctcacggattgccctgattttatcggcatccagagatatgactgcgcctctccgtcgatccagcttgacaaaaccttcctgctttaatacagaatatgctttattcaccgtatgcatgttaatcccgatgtcatcggccagttgacgcacggaaggcagcgtctccccttcgcggagacgttctgttgctatgcctattataatctgatttctaagctgaatgtaaatcgcttcatcactgttaaagtcgatctctacaatcataatccaccatctttcgtcaatttgttatagtgattatataacaaagcaaacatgaagtcaacctgtaaaatccttgtaaatgctcatgccgtttgaacagtttgttttgttaatcaggtgaggacgccgccgggacgaaagactcagccagccccctcaccacaccggccccggtccgtttcggacgcatcctccgtcctcaaacaaactattactaaacagaggcaaaccggacataaacggttcggctttttccgccccaccgcatgtccggttctcctcttttgtcttaattcaaatcaagaaactcaaaatcatcattgtccggcctggaggaccttcttcctgtatctcccgcttttgcggcacgggcccgtctctcgtcttcaaggcgctcccgttccaggcgttctcttgtttttctggccctctccgcccgttccagctctctcagcctgatagcctcttccatacctgcatcctggcttctcacaggtttctccggatagcgctgaaccgtacggccctggtcggcacttctcctctcaggatagccctgtccggctcggcccggctcggcgctccttctctcaggatagccctgtccggctcggcccggctcggcgctccttctctcaggatagccctgcacggctcggcccggttctgcattccttctctcaggatagccctgcccggcccggcccggctcggcgctccttctctcaggataaccctgcgcggctcggcccggctcggcattccttctctcgggataaccctgcgcggttcggcccggctcggcgcttcttctctcaggatagccctgggacatgcggctctggtctgatgtccttctgtcctgatacctctgctcctggtgtgccgtctgtgtatatcttcccgccggggttctctcgtcctggtatctatcctggtgcctttgttccggacggccctgctcaccatatctttgttccggcctccgctggaccggacggccctgttccgttcctctctgttccgggcgtctctgcggcagatatccctgctccgccgttccggccatcctgcggactgcggcatcctgataaccggacgcctggccgtatctgtcgtttctcaccgtttcgctgctcattctgcgttcctgtgaccggggataatcgtctccggcaggccgctttcttggtcctgaaccttcattggacgctttccctgtccgggactgcgcagactgccgccttttgctttcttcctcctgcatggcccggcgtttcacaggtgtcggagcctcttcccgctccggtctgcccgaatactctcttctgcgcatcaggagattaatgaccataaagaatagaatcaggcagactacaatcagtactacaattacaataaaccgcagatcgtaatccttgcaaagcgcattataatcctcatacagcttcgttaccttctcttcatcgtaaggactttcaagtgccggatcctcaaaataccgctggaatgtcttttcagctatatcgtaacggtaaagacctttttcaccgttctcattcataccatatacaacgcagtatttttgctcttcatccgtcttccacacccatcctttgactttagaatcgccattcaactggattgcagtctgggcaaaaccggcaggaacttcgattgagtcatcaatcggcagaaccagaatcgatctcgccacgctgtctattgtaacatagggcgataatgctcctgtctccggcatgtaaatatagaaggaaccttttccatcacttccctgtaaataaatcaggttaaggccatttccggctcccgacataatctcagttccgttatatgtgactgtagactgtgtatatccctccggcaggcccgcaggatcaaaggatgtggcaacactgtattccactccgtcaatatccgctttcagctcaccgacaaccgccccgcccgtgacagccgcctcattagcatcaccggccggcacttctgaggattccgacttgttgactgttatcgtataagatttaaccgtctggccgtcttctgccgtaaccttgcataccacggtattcgccccggtcttaagacctgagccgccggtcaccagtgtcttggctttgccgtccttcggttctccgctgactgcaatcttgtcaacgtcagcgcccacattcaccgtgtaagataatacatccggcgaaaaagccggggacagctgtcccggtgatactttaagcgaggccagcgccgcctcgcttgaataagtcgcaggagcttttaccttgactgctgacgaacctacctttgaaacatttacggcctgggtatcagagtcatagatttcatggctggccacggagattgtcgtgttacccgcctgtaccgctttaaatttcaacgtataggaaaactcagtagttgtgctggaatccatcgttccgacaaggcgcaccgaaccggcccccccatttgcattgtttccgctgacaaactcaatatatgcctgatcataggacagcaccaaatcggaagccccgaggtttccgtcagttgccgtaacttttaccgtcacattaaattcctgcccaaccgtcgtgcttggatccgaaaacgatatcttagcactggccgcataagacactaagcccccaaacggcatagccagagaaagggcaaacgcagctatcaggctggttactatatttcttactcttctgttcataatctctcccgcttaattcagtttctgaattcccaggatatccttctgcatcgcaagaatatccatgatgtccactttgccgttgccattgacatcggcggctttttcatatactcccgtgaggttttccagccccaggacatgtctctgggctttcagcacatccagaatattcacttttccgtcaccggtgttatctccctttacaattacatcatactttgcaacgggagaaccatccggaccataggcctggacaatgttccccgtaccgacactgcccgccacttcaccgcctgatgaagtgtagactttcacaatactgcccgcgcccgatgatgtcagggatgccgcaagctgtgctgctgtcacacctgcatttacaacctgatttccattcccggcagcacccggatttacaccgctgctcccggagccacccggcgatacgccgggagttcccgtactccctccggggccaaccaggccggatgagtcggatgatgttccaaaaccggataaattaccgcccggagccataggaccggttgtacttcccgactcgattccgccggaaccggagccgtcaggcggcagtatctgcacattggagccgccactggagccgccgggatttcctgaattaccggatgggctggaagagcctcctccaggtccgcttccaggtcctcctcccggaccggcccccgatccgcctcctgatcccggatttactccgcttccgatcgaatccgaataggtagggccgttgtcctgacgcacaacatgtattacataatttctgacactgccgttctccgccttaacagctacggtaatgtcattgtttccgctctgcagattgatattgccggtcccgctgaccgacgattttgaatcaatcaccgaggccgcaaccgtgacgctgccgaccgaatgatccacaatcagatcataggattccgtatctctgttgaatgttggggtgagagcaaaaccttcgacacccaaacccgaaagcttattgttggggctgccgtccaccgtcggctttgcacaggccgtggcaggcatgttcttatatacaggaatagaaaactcaagagccgttgttttaagcgcactgatcttagccagtgtgagaccttccgcagcggcagccagtacattggtcatgtactgatgcttgtaaaggttgtcaccctgaacattaaatttcttcagatacaatgtatcctgccctcgttttacataattattcccataataaatggagcctccgagtatggacttttccacactgttccatggacgctcatagctgccggactgtgatgcccaccaaagtcctctttccaccgctcccattgaaccggactggtaagcttctatattaaaaaagttgtaatatccctggtaacccggcacagtacccgatatgctccggccggttccctggctgccctgctcctgaataatcatggatgcaaggatatatgggttaacgccggactgaaccgcggcattcataatgatatcgacataggaactgcttcccgatgccggcgcagcgcctccggagccgctgccggaactgcctgggtccgaaaagccggaggaaccgcccataccgggcccatatgccgtcatcacacgatttacctcatgatcactgatagatgcaattggcgttatcggcgtaattccctggccgccgtcacctgtaccggcagacgctcccggaccggaaccggcttcagctccgggaccggagcccggccctgcactgccggaaccggaggaaccgccaggggaggaaccgccggaaggagcacctccctgtcctccgcccgcattgcccgaaaggaatgttccggcaaccatgctttccagcccttctctcgtatgaatcgagctgtcataggactgcttcataaactggaaaatgtatttatcatttaaaaagtttctcgggtccatataatatcgaatgatatcctccgatgcctgtacccaggagcttccgtcaaatcctggccatgtccccgtgtcccagtcataagcgcctgttgccgtggatttccaggaggagatattttcccggccaaccaggtttcttccgattacactctcattttcaattaccgtattccagtcaaggtttgtttgaagcgccgtaaatgtccactgcggatattgcgcatgcagttcgcgcagccccggcttgtaactctccggaaatccctggctgttcatatatttttcaaaatcaccgtctgaagtgattgcagtaggaaattttatgtaatcactggatacaaagccggttgtctcggcaccgccgcttccgctgaaccggatctgataccataactttccgtctgttcccgtctgctctccgataacggtaaccggagccccttgcgacagcttggccacagcctgataagaagtccccgggccgcttcgcacattcaggtttgtcgcattgacagaagcagtccgctcactggccatactgaccatatcgaacaatccggcacgctccgtcaggcatgggcttaccgccagaatgcagcccagcagcagggcggcagctcttttatatcctttatttttcattcgtgtctctccccatataccaaagcaggtattttcctctatattttcaaaaatttacagacattcttcaatgcaaaactatttattaagcaactgcctgatacggcattatgtacattataatgaaaaataccattatatgtcaacctcatgaacaaaagttcacagaatatccagtattttacattaattgtaagaatttcttaacaaattcccgccgggagcctaatcagggaaccaggacgccgatattcttccatggcttgtcacccattccggctttacccatatactgttttacaaaacgataaacggcgttaagtttgcatttctggcaagcttaacgccgtttgtttcttaactctttttgtcatgtacctgtgtttcctgtaccaattatgtaaatgtactttggtccacatatctttgacggccgggcagcatgtacgatttattcactcgcagaatatccgccgttttcaatcatataactgtgtctgcctgcatcgtcctcttcccagccggattttctcagcaaattctacccagcataattgtaacgagcatcagaaggattaacacggcctgctttaccgtatccttcctgcaccatttaagcactctgactgtcatatcctcctccgtctccggacctgcttttacatttttgcaaaacagtcccattatctatagtattatatgcagacaagagcaggatgttgactaaaattattaattcccctcattacacaagaaagaatctcgcgagcgagattctttcttgaaatctatccgggattatgcaacggttcatgcggtctgaactgttacagcgttatacaggatatgccctgttcagcttgtcggccttatgcgggtcgattcctgttgtctgagcctcacggtattcaaagaattccttggcaacctgcgggaacagcgcataagtcagaacatcctcatcctgcttcttccactgggacatctctgcttccagcttctgaagctgcggctcgattaaatcggccggacggcaggtaatcggttttgcatttccaattgctttcttctgtacttcggcattgaacggttttacagtctggccgaattctcccatcaggagctttttggattctttggtaaacatcttgtagcgctgtcccatcagaacgtttaatacggcctgtgttcccacaatctgggaggacggagtgacaagcggcggctcgccgaagtccttgcggaccctcggaatctcctgaagcacatcgtagtatttatcttccgcatgagcttcttttaactgtgatacaagattggaaagcattccgcccggaacctggtaacggagcgtattaatatccacgcccagaacctttgtattcatcaggccgcttgccagagcttcttcgcgaagcggtctgaaatattcagcgatttccgccagagcgtctttattaagccctgtgtcatagcgtgtgccgctgaatgtctcaaccatgacctctgttgccggctggctggttccgagagcaaacggtgacatagccgtatcaatcatatcgcagcctgcctctaccgcctttaaataggtcattgaagcaacaccggaggtgtaatgcgtatgaagatcgattggaagctttacggattctttcagagccgttaccagctcttctgccgcatacggtgtcagaagtccggccatatccttgatacataaggaatttgcacccatatcttctatttcttttgcaatctctttccagtagtccagagtataagcatcgcccaaagtatagctcagcgccacctgtgcatgaccattttccttgttggcagcttttacagccgtctgaaggtttcgaatatcatttaaacagtcaaagattcggatgatatcaataccgttggcaatggatttctgaacaaagtattccactacatcatcggcatagtgattgtatccaagaatattctgtccacggaacagcatctggagttttgtatgcttgaagcctgcccttaactttctcagtctgtcccacggatcttccttcaggaaacgcagagaagcgtcgaacgtcgcgccgccccagcattccacggcatgatatcccacctgatccatcttgtcgacgatcgggagcatctgatcggttgtcattctggttgcgattaaggattggtgggcgtcacgaaggacagtctccacaatcttaaccggctttttttctatgttagccattttgtaacctcctgaatttttctattatttcactccaaagattgccatgaatgtaccggctgcaactgcagtaccgataacgccggcaacgtttggtcccatcgcatgcatcagaaggaagttggtcggatctgcttccgctcccaccttctgggatacacgggctgccatcggaactgcggatacaccggcagaaccaatcagtgggtttacttttccatgagttaccttacacataatcttgccgaagataacgccggctgccgtaccgagtgcaaatgcaaccagaccgaggacaacgattttaattgtatccatattcaggaatgcctctgcgcttgtggtagcgcctactgatgttccaagcaggattactacgatgtacataagagcattcgaggctgtctctgtaagctgttttaccacaccggactcacggaacaggttgccaagcatcagcataccaaccagcggagctgttgtaggaagaatcaggcagacaacgattgtaacaatgattgggaaaagaattttctccagccttgatacaggacgaagctgttccatcttgatttttctctcttcttctgtggtcagaagcttcatgataggcggctggataatcggcaccagcgccatgtaggaatatgcagcaaccgcgatcggtcccatcagtcctgtctgtcccagctttcctgcaaggaaaatggaggtagggccgtcggcaccgccgatgatggagatcgctgccgctgccttgtcgttgaatcccaggaagatagccatgaagtatgcgccgtagataccgaactgggcagcagctcctaaaaggaagctcttcgggtttgcgataagcgggccgaaatccgtcatcgcacctacgcccatgaagataagggacggcaggatactccattcatccaataaataaaagtagtgtaaaagtccgccgacaccactcgacgaatcttcaactgttctcataatatcaggatagatattaacgagcagcataccaaacgcaatcggaagcagtaagagcggctcaaatcccttctggatagccagataaaggaaaatgagggctacgaaaatcattaccatatttccgacagtcaggttcaggaatgccgtctgttgaagaagattagacaatgttgttgtaatgtattccatattaatccctccaaacggaatcttttatgtcccgtatttaccagtttttagtttaatgttgcgagtgttgcgcctggttctaccatatcgcctaccgctacattaatgctggcaattgttccgtcctgaggtgctacgatttcgttctccatcttcattgcttcaagaatcaggataacctggccgcgcttaacagcagttcctgcctgtaatttaactccaagaatcttgcccggcattggggctgttacggctacggagcctgccgctggtgctgcaggggccggtgctgctggtgctggtgcgggcgctggtgccggtgctgccggagccggagccggtgccggtgccgccgctctgggggccggcgctgcctttggagccggtgccggtgctgccttagcagcccctgtgaagccctcttccactgttacttcataaacattaccattaactgtaattgtatagtttttcatctgattttcctcctgattcaattaagcatttttccattttgagccagacttgcgtctgattgaacgaactaccagtccttctgccggaactgccgctgctgcagaaatagctgccgtaattactgcaacaagctccatatcatccgccagattctcctcttcataaacaacaggctccggaaccggaactgctgaagccgccggtgcgggcgctggtgccggtgccgcaggtgcaggggccggtgcaggaactgccaccggagctgccggtgcgggaactgcagccgctttcttagcttcctgttttgccttgaaattcgcttccagcgtatttacattcttcaggctggctataatgaagctgatgaaaatgagtaccaggaatacggttcccatacccatcagtgtgttcattgccgctctttcgagcttctcgcctgtagtaaagattggagtgaagaccatctcggttgccgcaagggaagtgccgccgtaattatcgctcactacctcttccgccgtaaggacaaaatcgagttctctctgctcatagcttgcccttaccgttattttataagtttcctcatccacacgctcaacatcctcagaaagaacggataccagtcttcctaaatctgctttagagctctgccaggaagtaatggcactttccatgacagtgttcttctgtttctgtaccctctttaatgtcgttgccagcgtttcatcgtcatagctgtcaaactccttcagataattctcggctcccgtcttcatcgtagagacaattgtctccggaaccggctctgattccttcttgctgccggagcaggcggtaagggcaaagaagcagactgccatacataacacaagcaatacttttttaatattctgtttcatatatgcgtcacctcatcataatcagaccgttccatgctttttagacggacgatcctctctctttgtgaataacatctcaaatgcggcgattacgcgttttcttgtctcgcctgcttcgataatatcatccacatatcctcttcttgccgctgcctgggcagagctttgaagtttttcatattcagccgctttctcactgataagagccgctgcattctccgatttttcaatctcctctgagtacataatcttgaccgcactctgtgcatccatcataccgatctttgcctgaggccatgcgtatacaatatccgcaccgatggatttgctgttcatcgtaacgtatgcacttccgaacgcttctccgatcactaccgtaacttttgccacatctgcattggcgaaagcataggtcagacggcctgccgctttggcgattttcttctcagtacatgtgcactgtttgtatccttttacgttaacgagagtcagtaacggaatattaaatgcattgcagaaattaacaaattccgccgctttttcacagcctcttgctgataaagccgcatcaaactcttctgttttttcgttttcttcattataaatttcggtacggtttgccacacagccaaccgttgttccgttcaggcggataaatccggttaccatagaaggatcatattctttctttacttccatgaagaaataattgtcagaaatctctgccagcgctttggcagtatctccggtccagccggccagatctgcacaaaccctgtttaaatcgtcttcgcattcgtcataagacatgtcatcctcgttattagccggaagaattgatacaagagtcctgatctgtccaagaatctcatcttcactgccaaccatatcaacgaggcctgcctcctcactctggaactttgcagatgccgtatcgcacttgctcacgtcatttccagccagggcattgggagaattcacaaataacttgccgtcctctgccataaacacaaaatctgcgatagcagaagataccgccataccgccgccgcaatttccaaataccgcacaaatctgcgggatcacgccggatgccagtgtctgctccagatacatctggccaaaaccgtcaagcgcgtctgtcgcctcctgaagacgaagaccggaacaatctaagagtccgataaccggagctcccatcttcatcgccattttataaatgccggaaatttttttagcgtgcatttcgccgatcgatccgcccataacagacgcatcctggctgtacacatacacaagattgccttcgatggtaccgtatccggtaattacaccatcagccgcagtctcctgtgccgtcatgttgaaatccgtgttccttgctgtaacgtaagaacccacttcaacaaaactgttatcatcaagcagggattcaattctcttacctgacaatgtttgtgcagaattactcattttgctgtcctccatttgaattatttcgacaacggatactacctaccgtgaccccaaaaaagttcactttttagtaagtccaacttttgcctagtgccattgtataatgggttttgtcaaattgcaagttctttcagagagtttttatacacgttttttattttataacaactttttttcaccgaattttaagtatttctttaaaaacagcggccgcagagcgcagtccggtttgtttctccctgttttaacaatttttttgtaatttattattgcgcagattgtccaatactattaatgaatttcattgaaatgcatcaatgggaatcatgaaatagggataaaatgaaaaagcatgaatgaaaggaggattaattatgagcccggctaacgacaatttggcaaaagaatgtacctgtaaacaaattcttgcaatcgcttccgttccaaagcagccctggatgcagccccgagaactctctcttgcgctgaaacgaggtacgatttttgaaaatctggactttcctttttatgtaggaggtgaacagaaatgacggacagaaccacacttttaaaagaaattgacgaggtaagcttcgcactgaatgatgtaactctttatctggatacccatccggattgtgcggacgccatctcctattttaatcagatggcgccgaagcgcgaacagcttttaaaagatttcgcagcaaattttgaaccgctcaccgtagactgtattagtaaaaacggcggactttccgaccatttcacatggctggacggacccgctccatgggaaggaggtgccctttaatgtggaactatgaaaaacggcttcagtttccggttaatatcaaaacctgctgtcccaagacagcttcattaattatcagccagttcggcggcccggacggagaattggctgcttccatgcggtatttatcccagcgttattccatgccctgtaaaaaagtggccggtctgctgacggatatcggtacggaggagctggcccacatggaaatgatttgcgccatgatttaccagcttacaaagaatatgaccatcgatgatgccagaacagccggttttgatgcctattatgtggaccataccagcgccctctggcccacggcagcggcaggtattccgtttaatgcatgcgaatttcagagtaagggtgacgccatcactgatctgacggaggatcttgcggccgagcaaaaagccagaaccacctatgacaatcttctgcgcattattacagatcccgatgtgcgcgctccgcttcagtttctgcgtgccagggagctggtccacttccagcggttcggtgaagcgctggagaacttaaaggatacgatggattccaagaactactattattttaacccggaatttgacaagaagtttatacaataaagattggtaacagaaaagacagtatgaaaaccggaggaatacccaccctggcaaaacggcaggcaaatcctgtctgctgcggtgagtacttctccggctacatagcactttcttctattatataacgatggtccattccaatcctgggcatttgttactgttcacacctcgccaaaaaacggcgtgctgcgaacaataacacgcttcgcgggatgttaccgtatgaacagtaacgggcatttaaacagttggaaaaaatatccacagcgagtttgacaaactactgcaattcatattatacttgcagaaagaagattgataaggtgaggacaaaggaatggatgcacgatacacaatttaccacgaaatgatcgatgagctggatgagtcataccgcctgatgcatgaatacgactcgatgatccacgattacggaaccgccgttctctatcaggcagaatctaagatcattcatcttgtaggtgagcgaccgggcataacagccgttgaactgtccgcaatactcaggaaaactcccagcgcctgttcccagattctgcgcaagctccgccagaagggatggattgaacagacgagaaatgccgataacaaccgggaatacaacctgactctcactccggagggatgggctatctatgaaggccataatcagttcgaacagcgctgttacaaacgcacctataagaatctggaagctttcagcgacgaacagctgcgcatctttgtggaaatccagaaaaagctgaatgaaacttttgttctggacgttgaggaaagccgtgaaacatccgccaaccggaaagccggaaagcagccctgatatcagctgctttccggctttttgccgctatttgcaatcagatgtaataaatcaatgtccgggcccctgctgtgacggcgtctgctgagcctgctctgtctgctgcgctgcgtctgccgtctctgccgttatcggtgtgcaaacgccgtctgctccggcctgatacttaactccgtcaagttccaggaccgtatttaccgccagggcgccgtttgccgtgtcaaagtaatatctggctccgcctatatcctgccagccggataccatcgcaccgctgctgttaaagtaatacctggccccgcctatatcctgccagtctgtcagcataactccgctgtcgtttaaataatacctggctccgcctatatcctgccagccggtctgcatggcgccgctgctgtccagataataccagcttccgttaatattctgccagccggtctgcataacgcctgcagaatccatgtaataatgcctgccttctacattctgccagccggtctgcatctttccttcgccgttcagataataccagactccgtccagattctgccagccggtcttcatagctcctgacgcactgaaataataccaggatccgtcaatatcctgccagccggtcttcataacgcccgaggcgtcaaggaagtagcgtcttccttcgatctcctgccagcctgtctgcatctttccttcattgttcagataataccaggctccgtttacctgtgcccagccggtctgcatctttccatccgtgcccagataataactggctccgtccggattctgccagccggtggtcatccggcctgaaccatccaggtaatagcgtgctccgtcgatatcctgccagccggtctgcattcttccctctccgtccatataatatctggctccgttcacatccctccagcctgtagccattgtgcccgacgggtcaaagaaataccaggctccgtcaagctgctgccagtctgtcgccatctttccggtggaggcatccagataatagcgtccctccgggaatgtcatccagcctttggccggtgtgccgtcggcgctcatataatactgaccctggccatcattgatccaggtcgatttctgcattgtataattctgataataatatgtgctgcctccgatcgttctccatgtatttgccggaataacactggagaagtctttatacaggaaatttatgtccacgttgccgttaattccgttaatggagcctgtgttggtggcctgccacatggccggactgtcatatgtatacatgacgccgtatcttgccacccacatgtcataattcagcgccgacatatcgattttattcttgatccaatgctcattggcataaaccatcgggtggtatcccgccgcctcaatcttgcggcagaaggcattaatcaccgcactgacctcggaaggtgacaaagtgccgagtgtgttggcatcctccgcgtcaaacacaaccggataggaaatcggatagtccttaatcacattgagaataaaatccgcctcctgttcggccatctcaacggatgtcgcataggaataaatataggcgccaatgtcgattccgacgctgcttgccccaagggcattgatactgaagaagggatcctcagcccctctgaatcttgttgccagcatggcaaacttcacatcgtcagccgccacctggttccaatccacattctggttccagtaagaaagatcgattccccttgccagaacaccgtgaataggggttccgtccaccatctgatatacattgcccaccctgctccattctttcgcatatacggtgagcggctgtgaaaatacagatatcccagcagccctgccagagtacaggcagtcaaacgttttccatatttcataaatccagtacattcctttccgaagtaaattaactttttacagtttttcttctttcccggcagtcgggccgctgcggcagcataagtccctgcctccgctgcgcgatcctcgcggagcattttttaattcacaggacatacgtcctgtaaaataaaaaaccggtgtttggtataatatagttcattgtacattataccaaacaccgtcagggtgaagtcaatatattatttgtgaatttttctgacacttttcttacaaaatatccagacatttacaggcagtcttcagccggacccgttcaggcgcctttctttgtctccacatcttccggccttctcagactttcctgagccgggacaagcacctgttcataatgctcgatcttgctgtccagcagatccagcgactcctggagatccttcattctttccaaaagctgggctctctgctcaaccaggatattcttacgggcatttaccgtctccgtcccctgttcaaacaaggctacatattcgacaagcgcctctatctgtaccccggccttcctcatgcacttcatcagctgaatccatttcagggaatcctcatcataatccctgattccgcttttcgtacggggcacaggagggagcagaccgatgcgctcataatagcgcagcgtatccgctgatatctcataatttttacttacttccgcaattgtcatggtatcggtatctcctctcgcgttttcgtccgccctgtccgttcctcgctccggcacacaggctctatgccttcattgtatatcaattaaaaggatttgcaaagctttactaccagattcccatcactctctgcagcagcaggctgactcccgtgattccgacccagcagctaaagcccataataatcggttttcccccgttcttatcagatcgacaatattggtattcagtccaatcgcagccatcgcaagaacaataaagaacttgctcagctcttttatcggattaaaaaactcaaccggcacgcctgcctggactgccaccgtggtgataatggatgcggcaataaaatagagaataaagaacgggaatatttgtttcaggcttacttttttcccttcggccttatcttccttttcctctttttccgttctaagaaaagcaaggaagagtgtaatcggaataatggccagtgtcctggtcagctttaccgtcacagccttatcaagtgttgcagaccccaggttccacatgctgtcccaagtggccgccgtcgccgtcaccgaggaagtatcattgactgccgtcccggcaaagattccaaaagcatttcccgtagtcgtatcaaacccgagaaaattaccaaacatagggaaaaagatggctgccagaacgttgaaaaagaaaataacggatatggcctgggcaacctcctcatcatccgcctcaattaccggagccgtggcggcgatagccgaacctccgcagatggaggaaccgactccaatcagggttgagatattggaaggaatatgcattgtcttatgtaaaacataggcaatcaccagtgaaatcgtgattgtggacacgataatcggaagtgactctcttcctgttttgagtattacgtggagattcagaccaaagcccaatagaattacggcccactgcaatatttttttagaagaaaaatggatgccgcccataaaaggcgatttatcctttataaacatggtaattatcattcccgccataatagcaatcacggctcctcccgcaaccggaaatatctttcctgcgaaccatgccggaattgccacgcccagacaaagaagcaatccctttccatttttttttgcgaattccatttcatttcctcctgtttttcatcttttcattgaaaataggtttatatgtatcccggctcgctgtcctgccgccggaggtacttcctaattcatgaaatatatggtaactcgccccatcgataatgtaaaattatatatatttatacttcaataaaaatgtgttatgatatatcaatacatttatataagctattcacagacagtgaacagcttatacatactgaacagcacaggacacaggaggaaattgattatgctggatttcagggttagtacctttttaaccgtatgcgaatatatgaattataccaaggccgccgaggcgcttcatattacccagccggcagttacgcagcatatacactatctggaaaagctgtaccacataaagctgttccagcacgacggaaagaagcttcttctctccccggccggtaaaattctgctgaggactgcgtcggcgataaaaagcgatgagcagtttatgaaagaacagatttccaggctttcgccctcgggccttgccctccgcttcggcaccactatgacgatcggggaggcggtaatctctgaaccgctggcctcttatctgagccgccatcccggcgacagcctcagtctgatcatctccaatacggatgatttattaaaacgtctccgcacaggcgatatccattttgccctggtggaaggcaattatgatacgtccgaatttgactcccacatttaccgcaccgagccgttcattccggtctgctctacgcgccacagcctcccgaatgaaccctgccggatccgggatctgttcaatgaacatctgctgctgcgggagcctggttccgggacccgggatatccttgagaaacatctggacatgaaaaatatccgcctctccgatttcacccatatcacggagattggcagcatgcatgtcattctggagcttctcgaaaaaaatctcggcatctcttttctctatgaggcggccgccctgcagggaatccaaaacgggaccctgcgcaggatgcctctgaaagattttgaactggatcatgattttacgtttatctggaacaggggaagtgttttttcagatatttatttgaaggtttatgaagaactgcgccggtatcagtaagaatacgcctctaacggagcagagagaggtttctttccgtatccattttaatttttcctctctttctttctcctgtcctctgataaaaacaggcctaataatgttaaaaagattccgcatatcatcgccttcgtcatcttctcgtgcagaatcagcgccgaggtgacggccgtaatgacaggcaccatatagatatagataatcgttttgaccgagcccagtattttcacggcataattccacgtggcaaagcaaagcgcggatgccccagtcctaaaaagatcaggttcattagcataaccggttccaaaaactgatcaagcttcacatcgaaacccatccagaacagagccggtaccatcagaatgattccgtagaaaaaaatcctcctggtcacctgaaccgtgttatagccgaacccggtaatctttttcatcagcgtcgaatatgaggcccacagcaccgccgcaatgacggcaagtatatcgcccatgggattcagcttgagcgtctggccgctgtcaaagctgattaaaaagattccggccatggcaatcagaaaaccgcagaaaaaccttgccccgggacgtccttcccgaagaaaaacacaggtgaagataacggtaaaaaagggagctatggatataattaccccaacattagaggccagtgtataagtgagcgcgatattctcaaaaaggtaatagagcgttacgccgagcaggccggccagcacaaaatagccctcctgctttctgtccgccggtttaaagctcttcggacaggcacaccacagggccagataaccgataacaaaacggatgaataaaatttcaatcggtgaaaaggaccgcagaagtaccttcgtggaaatgaaggtggttccccagattaatatggtgatgaatgcggcgagatgccctgttaatgtcttattattcattataatcctcccctgctgcagaaagctgagtccctgtatcagtaaaaatcctctgatactgtttcggcgtcaggccgataaactccttaaaaaaattagtaaagtggctctgatccgaaaagcctgccatgctggctgcgtcaatcggcaaaatcccctgttccaggaatttcttcgcccggttgaggcggaccgtctgcaggtagcggtaaggcgagactccgacctgtttcgtaaaggagcggagcagatacgatttaccaaagcttgtcatggacagcaggttatccaatgtaatattctcatcaaaatgctcctccatgtaggcacagagagtacgaatctgttcccccggttccgttctttttacctcatcaaagggctggacatactcctgcagcacctgttccagcatgaagaagaaagcctcctccttcttcatggacggcgcatgggctaaaattgcatcatatacaccggccaccgactgagtgatttcactctgaaagacgacattctgtgtaaaatgcggcacaaattctttgcctgtaatctcccgcactgccttactcattgcctcagggccgatgttgattcctctgtaatccagaagcgctccgtctaccggcgcacagtaatgattatccctcggattaaaaagcagcagatcgcctgcattcagatcatattccttacccctgcaccagaggcggcgctttcctccctccacaaacccaaccacgtaatattcatggaaatggttcggaaatttctggactattccgcttaaattatatgcttctattttcaagtcttgatcatagtaaatatgacgctgctcctgctcctgaatcatggttctccctcctcatgtatcaccttccctgcagtaccgctatttcgtaaccgttcagacagaatgaactgttacgctattctatcactgaaaggaaaaaaattcttgtaagatatgacacataattgaattaaaaaagccggtacgccgcgggataacagtcggattcttttccttctgtcaccccggagcacaccggccggatcggctgttaagccagcccgattaatttctgcttctgtttaataaccgtaaaatgtaaaggaacagattgataaagtcaagatacagggacagagccgagaaaatagatgctttctctaaaacctcctgatttcctgcaaaatgtacataattctgtctaatctttcctgtgtcataggcggtaaatccaaggaaaacggcaattcccacataacacattacggtttccatggctccgagattcagaaacatggataaaatcccaaaaataatcaggaaaatcagccctcctaccaaaattggcctgatgccactgatgtcaattttaaaaataaggctgacccctgccataattccgaagaaaagtgacgttgccacaaatacgagaagcagctgaacgactccgaataccaggaagtatgccgaaaaaacaatgccgtttaacgccgcatagaacaggaacattcccctggccgcaccgacagacatcttattgactctggcagacatccagaatacggtgagcagttccagtcccgatattactatcagtccataaggtatcgcaaaaacaaacagaatggccccggtcagataccccgttacagcgattgcaaacgtaagcataaggcctgcaaacatccacagataagtttttgccacatatcttcccaatgtctcctggccgtatccttcggcctggtaaacctgattcatctgtccataatccattattatcatcctctctcttccattaatatcgtaatgctccggcctttaacggacaattacgtgacaatttattcctgtcaaggatagattaccacaatttcaaaaaagtgtctaccatttgttactgatcctcgagccttctccgtctttttctgcggagccgcaaaagaggtacgttgaatttttttaatgcgctgaagcaatagtagtaaataatgaataatacggttgtgattccccatgtcagcggataactgaatatgaccgttataatgctgggacggattggaaccgcaatgataatccagaccaccctgagggtgcagacacccaaagccgtcatgatcatcggtatccagcagtcgccaacgccgcggagcgcgcccgaaaaaatctctatacagatatagaggataaatgtcggaacgaggaaatacaggatttccatgccttttgcgattactgcggcatccgttgtaaacagcagatatacatagccgccgaacaagtacaaaaccgtgcagaggaggaatgtgataagggccgtaataccgagacagacgttgactccgcgttttacccgtgtcatcttgcccgctccgtaattttggcctacaaatgttgtgatggagatccccagcgcactgataatcatccagtatacgctgtcaatcttactgtatgccgtccaggcggcaatggtatccgttcccagagcgttaacactgctctggatgatgatattggacagggcatacattaccgactgcaggccggccggcagcccgattttaattattcgtttgaccatgaaaagattcagacggatcttgcggataatcagcttataggaatccgtcgtcctcatcagggcaaacaccacgagtatggcgctgacaagctgggaaaataccgttgcaatagccgcgcccctgacttccatccggagaaccacaaccagtacgatatccagcacaatattggtcaggcagcttgccatcagaaagtaaagcgggcgcttggaatccccgatcgctctcagaatcccggaacccatattataaatcaggttcgtgatgattccgataaaataaatatttaaataagagagagaataatccataatctccgccggcgtgcccatcgcttccagggctgtccggccgaaaagcaggccgatcaccgtcattcccaggccgcagacgagagaaaaggccatggctgtatgaactgcctcgccaaccctatcctcattctgcgcgccataaaactgggaaattatgacggtcgcgccggaagaaagtccgacaaagaagccgaccagcaggttgatcagcattccggtacttccgcctaccgccgccagggcctccttccctacaaaccgtccaacaataattgcatctaccgtattatagagctgctgaaaaaacgtgccaaacagaatcggaaagaaaaacagtaaaagctgtttccaaatcacgccctccgtgatagagccggcgcggctcttttttatctcttccttcttctgctccctggcagacaggctgttcatagcgcttctccttcttatcttttgttatattttactgtccgcagctctcacagttaccgccacgcaatgcgtttctatgaaagctcggcaatccttgtaataccgacataaatatgtgaaatcttataccaggtggcaaaatcaactacccctgtctgggggaggccaaaaaccgactggaacacttttaccgattcggccgtagccggtccgtatatcccatcaatcgccaccctcgggattgaggaatacacagttgcgatggtatcgagctgttcctgcatctgcctgaccttgtcaccgcttgaaccaatcgtcagattcgttcccggaaatgatgccggtattccggaaatcatctctgcggtgttaatgtacatgttgctgccataaaaatgtctgaggatctctatcgggctgtagccctgttctcctaaattgcaggacccccactgagtcatccatcccggacaggttacctgtcttccgtcacagtactgagtcaggatcggctgccttactcccggtcttgacagatagctgtcgaaaatatcatcgaccaccacggagatcgtgtcaaagatatctcttccgtaaatccacttatgatcaaaagcagtggacgaagtaatcgtaaagtcgtatccctggttcctgtaccattccgtgtaaaccctgttgagggtaaatgacataatcgccagaacattggctacgattgtggcctggggccatgtcgcataaatttcactggatgccacattcttgatataatccctgtatgggacataataattctttgccgttgcatcggtcgggactccgtcatgtaccacgattgtctgcggaaccaccacacggcttaaaacaatctcgccgctttcattggtcggtttaatctcctcctcggcaattttcggaggatacgttccgtaaagtgtatgatccgggatttcaatgtcttccctcgtcccctgctcttctgcagccggtatcatccgtatcggctgaatcgccgtaacgccggccaatatctccgttccgtttaccgtcaccggttcaaagccgggagccgtcacggtcaccgtatactctgaatacggtcttatcgtattctgttcatccagactcagggcaacgggaggcgctttcacggcaatggattcggtctggccggaattgttggtttgcactacctcctccggtgcctcctccccctgataccggatcaaaacatccgccccctggattggaaaattattctcactgtttaccacattgacctgcagatatccctgttctgtttcagatgcttcacaggcatgcaggcttttgtaactgcgtccatatctctgcattaatttgtaacctctcattacagttggttactatatcatataaaaataacgcttatgatatgcctgcggttctcagatattgttagcgtcagatttcccgcgtcaccttctccagccatttcgcctcttcctccggcagatatggagagattttattataaacttctttatggtaagcatttaacagctcccgatccctcggctccatgtattttatatcgatggcatcgagatcgatcggaacccaggtcaggttttcaaatttcataaactgggcatattcattcttctctgccttaacacagagcatcaggttttccgtcctgataccgaatttgccctcgaaatacaatcccggttcgtcggaagtgatcattccctcctcaaacaccgcattatcctgacgttcaggcactacgcgccagcggactccgttcggacgctcatggacgctgcccaggaagctgacgccgtggcctgttccgtggttaaaatcaagcccccttctccaaagcagttctctggccgcaaagtcgaaattataaccgtggcagccgtaggggaatttgacattcaataatctcagcatacaggatgcaaccagggtgaagcattctttctcttcttccgtcagctctcccagggcaaaggttctggtgatatccgtcgtaccttcaagatactggccgcctgaatcgatcagatacagtccgcgcggcatcagtttcttattgctctcctccgatacggcataatggcacatcgccgcattgtcggaataggcggaaatcgtaccgaagctgaggcccagattgccttccacttcacttctcagcttatccaggtaagcggcggctgtaatctcatctatctctgtcttacctacgttttgtttcagccagtacataaatttcaccatggcaacgccgtctttgatatgcaccttcctcatattctcaatctcaaccggattctttacggctttcgcagaggaggtgggattcatcatatcaaccaccgtgacgctgttatcaaggctctggcataccgcataattcacatgcgctttttcaagcatcaccgtctcatttttaaaggaaggcaccacctggtagatgtcattgtaatcataaagtttcactcccagcccggccagataggttctcacctcttcatttaatgtctcctgattgataaacaggaggatttccccccgtgtgacaatcagataggataatacgaccggagtacagggaacgtcattgccgcgtatgtttaaaagccagataatatcgtcgaggctggtcagaatatggacacccgcattcttttcagccattgtgcttcggagatccgctattttttccgatgccggcttaccggcatatttatcttccagaatccacaccggttctttcggaagttccggtctgtcttcccaaatttctccgattaaatcttcataacacgcgatacagatttcttttgcagcaagtctgtcctggagttcctctcccatcaggccgccaaccacgcggccgtcaaaaccgagaacgcctcccatggtcatggtctgctccaaatattcctccacagtgggaacgccttcttcccccattttaaacagctttacttcacttgtggcaagctccttagccgcctgcacgaagtagcggccgtctgtccacagaccggcttcctccattgtaataacggctgttccggcagagccggtgaatccggttataaactgacgcgccttaaaatagccatccacatactcagaaccgtggaaatcggccgtagggattaaataggcgtccatccctctttccgccatccgtttcctcagtgccgcaattcttgtaccgactgcttgttccatctttgttcctcctttattatcctccatagctttttaatgcatcctctatggcaagcgagatggcctcgctgtatgtcggatgtgctctcattgccgtggaaagctgatatgcagttaatccgttggcaatggccgtagccatctcgccaatcatatcggtggcacgcggacacataatctgcgctccaaccagggtatccgtatatgcttcaaaaataagccgaataaagcccattttctttctcgccagaatggccttgccgttgatacccatgaacgcctggccgcatttaaccttcatattatattgtcttgcatcttcctcggtaaatcctactgccgcaatctcaggatcggtgtagatgcaggtcggcactaccggcagcactacaaacattccgttgggaacgacggtgagctgcattctgtggccttttccggtcagatgttcaatcacgtaggtggcctgtgccgccgccacatgggcgagacgcgtctttgcgaccgtatctccgatggcatacacatgctcctgtgttgtccggtaagtccccttgactatcggcctgccatgctttaactccacccggcagtcctccgccagaaccttcgtcatatccggcctgcggcccacggagagaagaatccggtcggcggccagttctttccacggcccttcctcgcggtagctgacagcaacgctgtcaccgccccggctccggatctccatcacggaaacgttgcattttacgtcgatccctttggatcggagcgattcttccaattgctccgatatcatcggatccatcgtatccagaaggcgcccttttttctccagcagggtaaccctggaacccagcgcagaaaaaatcgtggctacttcaatgccgatcactcctcctccaataataaccagcctgtcgaagtgccactcaccggcgcttaagatatccctgctggtcagcacctggggtaaatccactcccggtatatccgggattaccggctcggctcccgtagccaatataatattctttccgacacagagggaggagccttcttctccctccacctcaacaatattatctttatgaagctttgcagtcccatgaatcagttttacattcctacggttcagaagggaacgtatcatactcctgtactcctccaccgactcatccttatatgcctgcatcttctttaagttaaatccaacagaatccacgctgatcccaaaccgggaggcatgttttaaatctccgtaaacggcggatgcctgcagcatggctttcgccggaacgcagcccgtgttgacacaggcacctcccagctcccccttttcgattaaggccacattcattccgaagccggccgctctcgctgccgccgtatagccgcccgggcctgcgccgattattattacgtcgtactggtctgccatcagctcccccttgccctgctgttacagcagatgtattttatgcttctccgcttccatccgtattccgtcgggccatatagatgcctgcacttctccgatatgggcttttcgaaggaagaacatacagattctggactggccgataccgccgccgaccgtatagggaagctctccatttaagagcgccttctggaaaggcagttcagcccgctcctcacagcccgccttctttagctgctccttcaatgcctcctcatcaacacggattcccatcgatgaaagctcgagtgcaatatccaggaccggataatatacaataatgtccccattcagtttccagtcatcataatccggcgcacgtccgtcatgcttttctccggaagccagcttatcaccaatctgctcaatgaaaaccgccttgtgaagcttggcgattctgtactccctctctttcggcgtacagtcgggatacatatcctcaagctgctgggtcgtcacaaattcgatatgatccggcagatatcttccgatatattcatactcataggccatataatcctccgttactttcagagccttatatacggcctttacgatcagctccagattctccctgtttctgtcttccttattgataatcttctcccaatcccactggtctacataaatggaatggatgttgtccgtgtcctcgtccctgcggatagcgctcatatcggtgtaaagaccttcacccacgccgaagccgtactccttcagcgccagacgtttccactttgcaagggaatggacaatctcggcaggacgatcctcctgctccctgattccaaattgaaccgggcgttccacgccgtttaagttatcgttcagtcccgattcgggcaaaacgaacagaggggccgacaccctggtaagatgcagctgctttgccagctccctctgaaaaaaatctttgattatcttgattgcaatctgggtttccctaaggtcgatcgccggttcatatcccgccggcacgattaaatgttccattttatgtactcctgttcttttcttctatataattttatatatcttattcttacagacatattattagcagcttttgttgatattcgttccactaagccctcatattataccactgatataaacaaatgggaatatggcagaatttttttcttgctttgccgaaccttgttgttcctgctcataacgtaatcgattgcacgacgtttttaccagttgtacggttaccgttattatacatatagaatgcttatctagcaagaagaaaacaggcaaagcagacatctgtggcggatgtccgctttacctgttcccctgattcttcttacctctttacagtctcagccaggctacttcgtctcctgccgtaaccgggccctcttttaccgactcaattccctgtccgccttccagtccggttaatacgacaatacattgatccgacgcggcgttctccctgatatactccagatcaaaccgcatcagcaaatcgcctttttttacggtatctccgtccctgacgaatacttcaaagccctttccatccagcttaaccgtatcaatgccgatgtggagcagatattcgatgccgtcttttgtcttcatgccgacggcatgttttgccgggaagacaaatttaaccctgccgtcctccggagcaactgcctcccccttctccggttcgaccagatatccgtcacccatcattttttctgcaaaggccgtatctgcggccgctgatattggatatgccttcccggtaaacggagaataaagccttcgcagcgtacctgcatcctcctccaagccggcgccgtttttcaggtattcctcaaagtttgccttgatcactgtgacattcggaccataaataatctgaaccgccctgcctcttttgatcacgccggacgctcccgtccttttcagcacatcctccctgaccttatccgaatccagaaccgtacagcgaagccgggtggcgcagcagtctacgtcggaaatattatcttttcctcccagtccttcggcgatcatgcgctcacgttccgaactctcctgtccttttgacgccgctcttttgccggcatttttcttctcattcacatccgcttttgtatatagttttgttccctctcccgaatcctcgcgtcccggtgttttcaggttgaatctcttaataagaaaactgaaaataaagtaatataataggaagtaaatgattccggccgggatgattcttaaccagcttgtttttgcattgccctgaagaattccgaataaaagcagatccagaaaacctcccgaaaaagtcagtcccactgctatattcaggatatgggcgatcatatacgcagaaccggccagaataacctggactgcaaacagcgccggcgccacaaagaggaatgaaaactctatcggctccgtaatacccgtcagcatacaggtcagcgcagccgagagaagcaggcctcccgccgtctttctgtgttccggctttgcctgtctgtacattgccagcgcggcgcccggaaggccgaagatcataaagataaactctccggagaaatatctggttgcgtcagcgctgaaatgcactacatccggggaggcaagctgtgcaaaaaagatattctggcctccctgtatcaggttgccgtccaccatcatcgtacctccgaccgcggtctgccagaatggaaggtaaaatacgtgatgaaggccaaagggtatcagcgccctcttcacaataccgaaaatcagggttcccagatatccggttcctgtcaccagccctccgagggcaaaaattgcattctgaaccggcggccatacaaaatagagcaggatcccgacaaatacatagacaagtgtggaaataatcggcacaaaccgggaaccgccgaaaaaggaaagagcattgggaagcagaatcttatggaaccggttatgaagggccgctacccccagacccacgataattcccccaaacacacccatttgaagtgtctgtattccgcacacgctggcaatagtaccttccagtacatccggggagatgcttccgtccggaagtattttccccgtgacctccagtactgcactgattgatacattcatcacaaaaaaagcaattgccgccgagagagccgctacctccttttcagcctttgccataccaatggcaacgccaatggcaaatatgatgggcaggttgtcaaatatggcgcttcccgccttgctcatgattaccaggaggccgtggaggatcgtgccctccccaagtatagtccccagtctgtaggtggcaattgtcgtctcatttgtaaaggagcttccaattcccaacagcagccccgccaccggcagaaccgcgatgggcagcatgaaactccgcccaatacgctgcagtacaccaaaaattttgtctttcatttctatttccttattcctttcgcttaagtctttaacactactagtatagccatctttttttcaaactaacagtttgcaggccatgccgcatacaggtgcagacttacagcgaacgataacatgcgcgctgcgcgcatggtcacggtcttcaaaaaaaggcatcatcaccagtaaatgcagtttccgcatttactggtaatgatgcccgtaccgccagtcgatcaaagctcccggctcagccattgccgctcgaattcctcagcggcgacaggaagtccgaaataaaacccctgaatcaattcaagtccggtatcacgaaccgcccggtattcttcttctgtttccaccccttccagacaaacctgcttccccacgttgtggcaaagttctgtaatcgcaccgataaaaatagcattaaaccggtcttctgttattcccttcacaaaaccgcggtcaatcttaaccacatcaaccggaatatttttgagagacaaaagtgaggagtaccccataccgaagtcatccattgccagagtaaatccggctccatgcagtttatccagcacattttcccggctctcctcctctttcatgaaataggattccgtcagttccagcgtcagactggagggtggcatggcaaactgctccagcttcttaagcatgtccggaacaatatcccctttgcggagctgatggtaggaaacattgatgctcatcctgaaatcaggcctgtatctccgccatttaccgcactgtgcggcggcctggctgaaaatccagcggcccaactggttgattagtctgctgcgctccaaaagcggtataaattctcccggcgatatgctgccatactttccgcaggtccatcttgccagcgcctccgcgccgaaaagcttccctgtggccgcttccacctggggctggtatgccactgaaaaaccggcaaacccatgctcgatgctctccctcagtaactccatcagttccagccggcgctctttctccggaagtatatccggtgaaaaacaggtgattctgtctttcccaagcagtttggaatgctccagcgaatagttggcgcatttcacaagttccagatactggctgccatcctccgggaaagcggcataaccggcggaaaccgtacagtaatatttttttccttcgaactcctgctgcctgtgcatcttatatcggattctgttaaatatctgaatatgatcatcccagtctccgttcagaatgaggatggcaaattcatcgccgtccagcctgtacattcttgcattggacggaagaagtgaggaaatcatctgtgcagtaacccggaggacttcatcgccaaaggagcggtcgtagagatcattgacgtttttaaactcatccatatcgagtatcatcagaccgaacttcctgccgtcatctaccaggtgctttttcacggtgccctccagctcataccggttataaagccccgtcatatgatcgatcaggtttttctttcccatgttggtaataaaaccggcaaaatattccggtttcccctcattatcccgcaccatcctgccgcggcaccgcagccagcaccattctccgaaaacgtttctggccctgtattcaatattatggtgctccactctgccgtcggcaatatcctggttactctccaggaatccctttttatcttcgggatggataagtacgccccatacggcggcagcattctccacgatctcaccgggcagcccgaactcttccaccatggccgcgggataccggaatatgcctgtcttcatatctccgataaacacataatcatcagtactggaagccagagcttcataaaggaactccctgttgtaatcaaaaccgggagctgtcctgcccctctccgtattgcggcgcagcctcatccccgcccggtcaatgtggaaattcctcttctggatgtacatccgttcatcggcccgggttataatctcattagcggaaaacttgtcgctcggataaactgccgttaccccataacagaaagaagcatcgtaatatatcccgaactgctcccgctttttctccagaagttccagcgctttctccatcctttcggccgccccgtcttccgtttcatcataaagagcgagaataaattcatcctcgctcagcctgaaaagcaggtccggctccgtcagcccctcttcaataattttagatacgtataaaagcaggttatccccctcatgatgtccatatgtatcgttgataaggtgcagtccgttaatgtcataaaacactacagtcagcatcttctgctcctgccgtgccagctctatcagctctgcaagcctgtcttttccgtttcttctgtccataatttgggtcagatcaacgaccctctgccattccactgtccccatattgtctgcctccatatggctccattcttccgggattaccaaactctccgatagctttcggaccccggatttatactctaattctattgtaatctttatttgggcggcagacaaggggaatttggaaattgttgctggtattgcgtatgggagggatattgctatcgtggcttatcaatatgcagccttttctttttcagataaatccgaacggcacaaataataaataaaaagaagccggcgatatccgtaacaatgccaggttttatcatgcaaaatcctgctgtcaggcaaatgaggcgcagccatggtcccaatggcaccaaaaaccagcctttcagtcctgccgcaaatgctgaaactcccagaagtgccgtcaaaaatgcttgcattatgacggcaggttttcccagcatcagtagttccggcgcatatagaaacataaaagggatgataaatgtaatcagccccaatttacatgctgcaagccccgtttttataaaagaagctccggctatctccgccccggcaagtgaggcgggggctaccggaggtgtaatcatggaaaccagggcaaagtaaaacgcaaacatatgagacggcagtgtctcaaagccaagtgcttttagtgcagggactgaaacagcggacacgataatgtatgcaaccgtagtcggcacactcattccaagtatgatcgatgcaatacccaccagaacaggaccgatccactggctctgccctccaagttttgtaacaaatccgacaaaattaagccccagacctgaatatgacaccacgccaactacaattcctgaaattgcacaggatacagcgatcataaccgtcctcttaccggataattccagggccttcagtattttgggcggtgtcagacgagtttcttcactaaaccagctgacgattacgacagtcaaaatcgcataggctcctgcaaaagccgcactttttcccattaaaagcagtatgacgagtacaatgagaggaattagaaaaaacagcctcctgttgacttctttccattctggtatctcttccacaggaagtcccttcaccccgctgagggccgattcaaaatccacctgcagaaaaagagagagatagtaaagaatagctggaattaatgccgccatcataattgttgcataggacagtccggtaaattccgccatgacaaaagcggcagcacccattaccggaggtgccaattgacctcccgtacttgccacagcctccacggctcctgcaaattcaggacggtatcccatcttcttcatcatggggatagagaaggaaccggttgcataaacattggctaccgcgcttcctgaaatggagccgaagaggctgctggtaataatagcgatttttgccgggccgccacgcgtctttccggcagccgcttttcccaaatccatcagaaactctccgcctcccgccatttcaaaaaagctgccaaatataataaatataatgattagggtagaacacacagaaagcggcaggccaaaaattccgtcgaagccaaagcaggtgaattcggccatagccctgaaagaaaatcctctgtgtctgaacggtccgggcaaatattgcccgaaccttccatacagaagcgctgcaattgcaataatcggaagagcaactcctgtagcccggcgtcccgcttctaaagtcaggactattattgctattgagacaagatactttgtattgtcaaaatctgacacaagataaatccaattactaaccgtcccacggtgaattaaaagatatcctacggctgccaatgctgccgcggccagaatacaatcaattaccgtaaagacgcgtgaactccccctttgaacggccggtaatagagcagtcccaaaaccagagcaaacaacagatgcagcggtctctgcaccgatgcctcaaaaataccgaaatatccggtatataaaaagagggctgcaaacaatatggccaaatatgtaataatgttatgacttctgtattttggatcatctgctcccaaattcaccgtctcctttcccctgtcacttcagatatccgacttctttgaaatatttttctgctcccggatgcagcggaccgcccacattattgcatgcctctgccggttcaaaattggcatgggtcgtcccccaggctctgatgatgtccggtttttcacaaatcagcttaacaacctgataggccacattatccggcaaatctgtccggcatagaagaatgtttggttcaccaatcgcccagaactcttccggtgcaaatgaataggtacctgacgcaaccagattttttgaatacccatatttgtcagccaatatttctaccatagattcctccagtggcagtaccttcagctttacactggtagccagctctgtgatggcaggaaccataggcgctataatcccgtcagcgtggccgtctgatataagctggcagccatcagtgtaactgagataagacatactgcctccccatgattcaagagcatctaccgtcataccaaattccgccaaaatccgctccgcaccgagagatggtgtacttgactttgacgtcgttaccagacggatcgggtatttctgatctgctatttcctgtatagaattaacaggaagtgactctttaataataaacaggcatgtgtcactcgttccaatctcggccagacaggacagattcttatattttttcccttcatatggggcagttcctgccaaagccgaacggtacagatgggaaacggtcgtggatatgtccatctctcctttttccgtcaaatcgatgtttccgattcctccgccgggcataacggaaaatttcataccgcttatgacgttttcacattccgatgcaagctggcccgcaagtccgtaccaaccgccgccctgagggccgccgcctattgtaaagcttgtcctctgcggtttttctgtcgcctcttccgccgttgtttcaacattctcctttgtcccctcctctttttgtcccgcaggctgttcggccggagcctgtttttgacatccggtcatgcccgcaaggcaaagagatgaaaccaatataccaagaaataatcgattcatttaaatctccattccgcgcgccttcaggcgcggcacaaatagtgatgaaagattttcaaaacctctacttcatgcgataataactttcaagaagctacactacaaagcacgggaggaggagttgtaaattctttctcgttttagacagcatttaaatcagtgtaagttctgccttttcaagcacaaataagtggctctataagaccgtacactaagaattgttttaacgccttggttaatttgtgtggcagttcagtcaatggcttcttatctttttcagaaaggagtctgactatgaaagttacttacaaaacctgttgtggtgtcgatgttcacaaatcatttctcgttgccacaatcattactaccactggtggtatcgaaccttcctatcagaagaaacgttattccacctttaacaattcaattcttgaattcaagcaatggcttcttgacaatgactgtcatgatctttgcatggaatccaccggtaaatactggattcctgtctttaatcttcttgaagatgaaatcaatgtcaccattgccaaccccaaatgggtaaaagctgtaaaaggcaacaaagatgatactaaagattctaaatggattggagatttattccgacttggacttgtaaaaggcagttacataccttgtaaaaagattcgtattttacgcgagttcacaaggtatcgctataagattgtttcctgccgttccagtgaaaagaatcgatatcagaatgcgcttacggtttgtaatgtcgcactggattctgttgtatccgatatctttgggaagtcatccacatccattattgactatttgcttgaacagtctggcaattctatcaatcatgaagaaatcgcttctaaacttcttaagagcctcaaatctaaagaagatgccgtgattgaatccattgaaggataccagatgactgattcccaaaaatatcgtatgcacctcgtccgtgcacatatggattatatcacagctgaaatcaatgatgtagaccgtgaaatagaaaaattgatttcttctgatcctgattttgaaaatgcgatccagtttctaatgactattccgggtgttaaacgtgacagcgcaatcactgtcatctccgaaatagggattgatatgactcagttttcaagctccaaacgtttatgttgctgggccggattaactcctggcagcaatgaatctggtggcaagaagaaatccgttcgggttacacgtgccggtgtctacctcaaacctgcattagtgcagtgtgctcatgcagccgtcaaatccgagaaatctccttactacaagaagaaatatgaatctctgatgaaacgccgtggcaagaaaagagccattgttgcaatcgcccgaatgattcttactgcaatttaccagatgttatcaactggtgaatcatggaatccaagcgatttgtataaaatcgatatacctgaagctttactggaaaaacaaaaagcaaaagccatcaagcaagccatgaaactattgcaacgcgagggattatatcctccaccagaaccaatagcttcttaattgttgttttaataaacacttataaaaagttgccacttgctgacagcttagataagtatgccacttttgggctgtcctctactttctttcacactattcctcctcgtataataagtttgtaagcaagaaaaaccgcttacagacttattcttttttgggtataaatggtaaggatatctaagaggtactcccctcatcccgattcccatctatacagttgatagttacatttcaatataggtagatcctgtggtatgatatcaggtagagtctgatgtccgaaggcactgcttctcctcctttcagccggcttcgtccgagactgctttgaaagcattcagcctggcacatacggcacattccgctgacacagaattttcatccccagccgttagccccagcaaaaaaggctgactgggtgcatgctcattgcgcgagggttcggtcaccgtatgcggcacaggataaaccttttgcttcaggcttcacaaatccccatcggaatggaggtgatatcatgttaaagctcaactatatgtccaccttgtttgtaggtattgatgtaagctcaaagaccaatgccgtctatgccatggactttgaggaaaacaaatacatctcatcgtcgtttggcaataaccagccaggcgccgatcagcttgtaaatatgattgccgaatgcatgcagaagcataaaaacctggatacggttcttatcgtgctggaatctacttctgtatacagcgtgcatatttcaaacttcctgtcggccagcgaggttctcatgccctacaggccttacgtattctgtgtaaacccaaaggccgcttcgaattaccgaaaatcctatatcggaatggaaaagaccgatcccacggatgcatatctcatcgcggacttcggcagggtaggccgcacgaaaaaactggagccatggcgcggcgggcagttcatatccctgaaacgccttacaaggcaccgtatgcacctttctgagtgcatcaccagggagaagacttatatggtttcgaatctttatctgaagttcagtgaacttcagctccttgaaggtgatgacaagccttttggcagtctctatggtgccacgtcctcagctgtcctgacggaatttttgtctccgcaggagattatcgatatgccggaagaggatctgcttaccttccttgcggggaagagcaggaaccgcatctctgacctatcaaaaacttcggaactcctgcgcaaggcagccagggattcctaccggttagacaagtgcatgtatgaaccactgagcatatcactggcaagctcgtttaactgcatccacgcctatcagaaagaaatcaagctgatcgagcaggcgattgagaaatgcatcaacggaatgaaccctaacgccctgctcatccttcaatccatacctggaataggtccgatatgggcatccggaattctatcagaaataggcgatataaccgtgttccattcatccgatgcccttgccaaatatgccggcctttactggcctaagggtgattccggagatttcacttctgaggacaacaaaatgtcgaaagccggaaatccctatcttcgctgctatcttggcgaagcggcaaacagcgtcaggaagcacatccctgaatatgctgatttctatgccagaaaatatgctgaggtaaccaaacatcagcacaaaagagcactcgcgcttacatctcgtaaattagtacgactcgtttttggattgctggtcaaaaaccaactgtacaccggcgaaaagctggacaccgaatataatattgagtcgaactgacattcggttatacgtaaaatataccgaaggtctgttaaagttacccttttttctgaaaaacatatcaaaatcttcttcaaaaagttcttgacatatcaccagaatgctttctacagatatgcttatacaatttactgaatccttttgttgttgacccgctatgtttctacgcctgaatgcagaaggtcgatcaaaccaagaatgtcaaaaaccggcaattccagttttttacgaatagtacgagaatatggtgcaaggtttgtacattccagaaggaatatacctatatctggatgcttctctttcgacgcctcacaaagttctgtcaattccctttctatacgctcaccgtcaaattgaaagggcggtatacccgacataataccacgcatgaattccggactgtgttccatactgaacaaaatacaccgttccttctggccatccggaagctttgacaaataatcgacaactgcatctgttttgctgctcactataactgccactttttttctcgctccgatcagattcaacaaaagaggcagaagcagaagcgctgacgaagctacgggaacctccagccgttccgccatctgtttctggtgaggaagaagaaggccacagctggttgcaatacttttacaccctttttcttccaatccttctgctgcctgaagcagtttttgtaccgcatcctctgtctccctatgtgtcaaatctcctgattttatccgattaacaatctcatattgtaccggataaataaacgaacgcgcattgccaggatctccaagtggtctgggaaagcggcaatccagcattacaattccgatttctgctccatatactgcctgcccgcctttaataactgccatatttctcctcttttcattgccctactttcatttctccgcgttttactgtttcacgatctgtcctcatgttccatctcgtcatgcatcattttcagataagctgactgaagctcccttgtcatctccacacaattttccggggagcattctgtccatttgagccccaggctctccctgagccagtattgctccgattctgtaaatacagccgtaccgtcttctttcacatagtcaagcccatcctttttcatacctgcagtgttaatctcaaatgcatcagccatgctgactccgtccggcagaaccagttcctgcctgtcccagtaaagttttaccggcgcaccacccggtataccaagaacgccggaaccatgacggattactcccttatccatagcaagagcatatgccgtctccactgctgaagctgctgttatcgacgcattattactgaccggtgcattcattgtctcgactccggtaacatcagttgcatagttgacgaagccgaatctcttttcttccgtaaattcgtccgtgatatcgtgtccttcgtaacatatttttaaaataaagggaacttcatgggcgggaaaacgacggagcgcatgatgggcaatgaggcgtactgttattttatcaggggaagtgctcagctcctctgccactctcaatgcaattccctggcttgtggagtcaagtgttccggctccgattgtcggtgcaagccctctggcgtgcaaaatcggtcctgccagatccggcgccgagagattcactacacggcactccggaatagcttgatgtaccgcctgcatcagaggatagaggaccaccatatcctttggcagcgtatgcgcgaatcctggaatcaagcccattctcttctgcctctttttcatagctggaaaatatggatagagagacattcccgttgcgcagttgatgagcagaccgggagacagttcttttaaaatttcagcagtgccttcaatattggaaagatccagtccaactggcttgacgagtgttccaaagccccgcatcaaagaattcgtctgtgcattatagctaattgtggaaagattggccttgtttctggcaacaacataaatggtatcggcaagccccaaacgggcagtaaaaagagcggcataagaaccaacttctccggtggccccggtaatcataatactttttatctttttctccatcctgtttttctccttccctctcaaatcagctattttctcttaaacagccgcaccagcttcggatgcacaaagtttccatccctcattacctcaatatcgtcgtactttacagttgcttttgtcattaatccatctgtatggccgttggcgcgtattacgcctccgaagcagggaaggtcattggttccgaaaccaatatcaaagacgccgtacatgcgctcatttaagaacttaagttcactcaactgccggatggccggattaatgccaaatccataatggcaggttcggtatatattgggatcatctctgccggcaaaccatgtttcaaattcttttgcctggactcctccggaaaacttttcaattcttccgttactgattaccagggttatcggctccctcaaaatgccgacaggataagcaaatgcatcaaagactacggttccgttccaggtatcttctaggggcgcctgtcctacaactcctgccggtatataggcctcgtcatgaggatgttctgcctttccgggattagtctgaaccggacgccctcccagtttcgccctgatatctgttccgccggctgaagtgatatgtacctcctgggcctggctgataatttcttcaagaacaatacagatgctgtctgtcaaagtaaaatcagcctcataaatcatatcatgcaccatgcccgatgtggcactcattgtcccaagtactcttgtgccaccgttcagcatctcgagacatgtctgtgtataaaaatcggcgctttcatacgggattagcggaattaccaaatccgccgccttcattgcctctcccaaatggggcggtacatcaatattctggattccccggtaaggaagaaccgacagaatcggtgcagccccttctggtgagctgcttcgaataaagctcctgcaagctccatgtccgacggtggttcacagacaatcaggaccttttcacctgctttaagacctgccctggcaagatatttatgagccatacgcagcatgagatcatgagaataattcatagtttctcctttcttgtactaaccatagatttttggtacttgttcttcagttcctcaattgtctggcccggccggaaccaatcaattttcaaaatattgttcataaaccgtttaattttctggttattctcatagtagcatacctgtaaatacttgtcaataaaaggtcgcatttttattgttccaatatgtaatttattttaattttttttagttttaaactcatgtggtataaaccaatttacataattatccaatattatccacataaacctgctgacaaacctttttaaacatggtacaattagatataatgtttagaaggagaatacgaaaatgagctgtgttttttctcttgtagtcgataaggcacaaaaagtgccggcatataagcaggttgcccagcaaattaatgaactgattaaaacggaacagcttcaccctggtgaccggctgccgacggaacgtcagctcagccaggatacaggaatcgcccgcggtactataaaagctgcttacgctcttcttctcgaagctggaaaaattgaaacaagacggggcagcggttcttttgtttcttctaaaatgtccgccaattctatcgaatacatccggcgggaggtacgcaacatgctggagcgcatcagcgatttacaaatacatgcagatgaccttcttgccattatccaggatgagatgaaacaactaaatcagacttctgccacaattaatattgcttggattgattgctgtgacgaatgcgtctggtctgccaaaaggcagcttcagcctatcgacagggtggggtttgccggttatctgctgaatgaagtagcttccaccccatcccgcctttgggacagttttgatttaatcattacaactacgaatcattaccaacttctttgccagatgctccccaactgtctggaacggctccagcaggttacaatggatctttcaagggattctgctatcagcatagcccagataccggcaggaagccgtgtgttaactttgtgccggaaccaaatcttcagcgacattatgcgtgatcaactgaaggattttgataatctgccggcagttctccattttacggatgaagatcacgatgaaaccattaaaagacaactgcaaaaagcagatgtcgcgatcgtctatgcagactacattaacagcggccgtaagggaatctgtcaggcactgaaccgatttgccgagaacggcgggcagattattccattcgattatcgactggaccgcggctctgtattatatatcagggaaatggttgaaaaaacaagggaaactaacggagagcaaaatagagtgggggaataaaacagaacgcaatgcaccgcagaatcaaaaaaacataaaaacgatgaaaggctcgttttaagaacctctcatcgtttttatctgtcgcaatatcagccgcagaacttatctgtcagcggctgggatgatttctgaaatgtgaaatcacgccaagcataacgcgaataaccagccagccggcgaatgctcctaatgtattcatgatgacgtcgtcgagctggcagtgtccgcgctgtgtcatatactggaccgtctcaagcgacacactggccagaaaagcggtcagaacgcagagccagcctcttttctgcattggcgctatcagcagaggaagaagcattccccaggggataaacatgatgatattttcaatcacataggcattcccctgggcgctgtgccccaggtccccaaaaattccaggttgacggaggttctggagccgggcggacgcgagaaaaatgcctcctgaagtaatactgtcaggtagacggctaataagaacagggtaaaaatgagaacggcatgtcttcctgcactcctgctgcggcccggtaacggccctttttttatcctgttttctgcaaatagaagaaaagagccggcagcggcggcggccaggccgatgagaatggcctgaggcagatagcttaccggttctttcatgtcctggaacatgtaattccagagttgtagtttgcttaagattgtcatattttgattatttccagtctggatcgaattattccggcaggtaatcgctttctttgtaaaggaagcgaaactgcctgatgtggtatttacttattatagtgaattgaaggtggagagtcaatatagtatgggccagtcatttcacgtaagtttgaaagttgtataagaagaaaaacactggcaggccgcatagaacctgtattttggtcaactttaccccatattattgtgactatcgtgacttcgctgatattcttgtccaaaaaggccacctcaccggcaaggttgttcatgaaaaatcaacttatataatattatgctattgagctgcttattatctcgttttaccgtatttacagaaagaatcttaacaatgcaattagaccattggcattaagtatctttggcaagtaccagtgctgcaaacagtccgaaagttcttcaatcaaattatagttaataattttcttattgataatcgcatttatatttaaatccaataacgtattagccggaactgtgagcgcaattgtaaacacgccaaaattcattgctactatagttgaaactacaaaaaagaccttttttatagagacatccgctgaatccgctgataagaatacacgttctactacttcggctcaaatcaatcatttttgaaagcacagcgataagcaactcactcctgaatagggacacaagattacttgccacttgatgcctttatcggacatattttcatacattgattacatcctacacagtatttctcgtcgatttgcggatatgcaaatcccttttcatcttcaaccatgcggattgctttcttcggacaaattgcataacaggctgtacatccgcaacattcctcttttcggttatatagtaccggtatcactctttccatcatattccccccactatcgtgcacataccagaatcgtagcacactatttattatgtatcagacattcagacttttatataattttcgtgataactcagttacaacagctacaaacaccatgctcatagtaaatatcacaaatgaaccaacacatccccagacatgctgcataccgattttgcatgccacaaatgttaaacgtgtcataaagaagggggcacgatatataactatgctgaatattcccgcccagctttcgccacgcggtcatttatatgttccttgtattcaagggcagtgcaaaataccgctattgacaaaaatgtggtactgatatactggtctctcgttgcgttcacccccacttgttaccagcagatacctctcaagaattgtagtcaaaataaagacaggtattcccaccaaccaattctcaagctttttaatttgattattgcgtgttctttattgtagtaattccctgaaatctttaggaaaattggaactgctattctacataccgctatccagtcccccctcaccgatgactttcggaagtatatgaatacacacaatcatgaacgcacatagtattctcaacgcgtctacgcttttatatctcattacttcagaactccttttacaattcccttaatttttcgagcagcacatctcagaatggaaggctggggcgcatactttctcaaaacaaactggattccatgattctggtagtcactccaaaattcatctcttctgggagatctgtctgtcggcttaatcaggttcggctgcaaacagtcttttgtattgctctctttccattccacatgagtcttaatcttctcaaatacttccagccccttctccgtgtgaacaagaaccaacgatacgcctccatcaatgttgaagtcaggaagtgctttttcaataccccaaaagtcaccaatagtcaagtcaacttctctttccgttgttgcgtatggacactgatagcaagacggtctcaatgcacacttattgtaaaaaattgtcagatagtcctgaatacttttttctttcccattgatatctgcatacgcagacggtctatgccaaccatttctcttatcccgaaagtttagattggaaagtttttccttccccttcacataatccttccaaatttggggagatggcgaaccatggcaaatgattccaacaatcgtgacacgatctcttaatccccgtgattccatatatctccggaagccatcggcttggcatccaactccaacaaacagcagattgccatcattgctcttcagccaactttccgcttcccgaaagatattgagcggataggactgcatatatttagagcccctggcttcatctcttacctgggtggtaacatataaaacaaattccgtttgagatgtctcatagttatagactggagaaacaacggcttcacctcgggacaaaaacacatccgaaattgcggtaaaggcaccacccgatgaactgcgctgcaattgctgactgtcttttagctttacagcaaatgcttttgtttcacttaattgactcatatttttccctttccagacatactgagaagcagcgaagcatcaattcataccataatttaagattctttattgtttcctccgaaaaggctccataatccctacctagataaagattcatgatgtccactaaatataacaagtagctaaaataagcattctcaaataaagcacgcagctttccttggacaaaatactctttaaaatcacttagaatctcatctgcattctcatcactctcatataaccttgtttgcgtaaaaaagtgaaaaacatccagcagtttcggataagtataactcgcatattcaaaatcaaatacttccaatgtatttttttctgttaagtatgtgttccagggcgtaaagtctccatgatagaaagaatactcattaacgcctgtcatcctcacctcaatgagttgtattacattttctataaaatccttgtcatagggatacggaatcttatgatagttgtctttgaattcacataaagatttacagtaatccgtttcaataaacagacagggccgttgtgttttattggataaatcgatcagaaattctatatgctggtctgtaatatcatgcagagtagacgcaccaaagtttttttccgtgctctgaataaaaacagactgcacttcatccaatttctctaaaaatagaacctttggaattgcacccacagctttttggctgagatatgctaaacactcagcttctttgcggaaagaatcgcagattctagggtttgcagagaatttgcaaaaggccaatatctcattggaagtatacatctgaatggtcggcttattatctctgccaggtgtaccgagaaagaccgaatactggatatcaggtttatcaaacaagtcattcatgcgctgcacaaaatccggatcaatttggatttggacagtgtgaatttcaaattttttgataataaatgtgaaatacttaagggcggaaaggtattttttcagaagctgtccttttttggaggatggctgatacagctccagcccttttcttacactagaaaacggaacgagccatatctttccacctgcattttttatttcaagatattttgctcctgtatccgaataattaataatcgtcttcataacactttattctttccttatcttacgcttcaccagtttcaaaatctttgttaaatccatctggagatctctctttataaagaaaattaccagcattaacaaaaatgtgcagagaaaggttttactgtcatcggtacaagcaatgcatacttgaagcagaagcagcagattacagataatctcctttgcccaatttacggacaacttcataatttttcgagaatcaaccacacgaatcagccaaactgtaatataactgatacaagttgcccatgctgctccaaatcctccatacaacggaataaggatgacgttgagaaccatgttcgacaatgccgcaagcacagtggaagtaaacaccatcttcgtctgtttagatgtggtataaatcgttcccaagaaaccggacataatctggaacgttacagcataaagcagcactggtacattaatccatgccatgtagaaatctttggaaaaagctactctgcacacaactttgttaaacgcaatcagcattgaggcaagaaacatacataccgtggagtatttgtaatagacatcgctgaaatattttctgttctcctcgcttccaaatccatccactgcagatatctgccatgcgttgaagaaaatacttgagcaagtagtaatcagcgatggaattttgtagctcacagagtatattccgttcgccgcaataccacacacataggagacaatcagcttgtcagaggaattgctgatccaccagctgatagaattagggatcagcggaatggcgtaacgaatcatttcccgcctcttgtccttatcaatggcagaaagtggtatgatatagcttccaaacttgcccagagaaaactggataatgcccgtaatcaagaaagagagaataaaagacagtaaatatccgcgaacaccccaatggaataccagcagaaacagcaaattgcaggcgatggctatgaagccggaaataattcctgtcacagaaaataaagtagttttctccagacctctcagtgcataggataaaaagcaattgaccgaatacgtaaagtaatacagcacaaatagcagatagtattctttcagggcatctacaagtaacaccaaaggcgacaagcacagcataatcaggaagccgaacagattaatgtagaagccgatgctgatgatttgctctttcttttcgttcttatccagagaaaaccgaaggactgcatcgtcgatcagcagtgtaaacagaggccagatcatactgctgattgtaataagcagatccgaagttccataatcagacgtagacagcacgtatgtgtaaaagggtacaagcaaaaaggccattgccttttgcgtgaaactgcccactgcaaaaatcaatatatttttaccgagctttttgttatttgagttcatttttccatactccgcttcattattagggtgcagctattctcttaataagttaaatgcatgtaaatttcagatatcactgccaatgatgttcaaagtaagccatagacaacctgaattcctgttaagacctcaacatctatacaaaccttcaagcttgtacataatataaaccattattattccgtttctgaatccatggcgttagctttaatgaccgcatatttattgtaacaaaaaattatgccacacgacgctaaatatgggaacagcgtctgaaaatcatacaatggattaccagtaattccgtaaaacaagaagaatgtctctatcataaatgcagtacatatcgatgttttttcgctttttgtataattgatacactttactttttttatagttcgccaagcctgaacatagttgtaaataaagaacgcaaagtacaggctagctccaataaaaccagtttcgcacaaaagctgaacgtaaatgttgtgaacattgataaacagtcctgttgtctgtgcaaagtaataagatgatccattccatccaatcccaaagaaaggattctctcggaaaatcaacatcgattctgcaaatctagcagttcttccaagcgtcacatcacccatctctgctgtttgccgaaatctattgataaagtttgccaattccggcacgaattggaccgcaatatcaaataccagcaccgaaacaatggcaataccgcagatgttaaataatctggtcatcttcttatcactattgtagagataatacagcagcaaaaaagcaaagacagatacaagcaactgtgatctcttaccggtgagcagcaaagcggagatacaaagcagcaccagaagatagtgcttcgttctcttttcgttgatgagcaggctcactgctgcactgaagccaaaagccaaatacaccgcattggtactgtatgtaggggaaataccgggtgcccatccgttctgaaattctctcagtgcagtgcttccccatgttccgagaagcggtacaactattgaactgtaaagacctggaacaagtttaaaaaaccaagttgccattgcatgaaacagcccgaagcccagacacacatcaaaaaaagttttgtgccacctactgtctttcagggtaagaatataaaaaagccacgccaatatgtaggctaaagtattatataccaagattgttccaaatcgtttattgtcctggttattagacagcataattgccaccaacaagaaggcccacagcgacatcttattttttaggaaaacctttttacggtcccatacaagaaaaatgccaaacagcaacacaagaattgcgttattcagtcctccaaataacgcaggatgcagccccgttgtgaaagcaaataagcagatcaggaacattccaagataaactctcagagtctgctttccaattttcatttgcttgtctccttaaaataatgatacaggttcgtcaaaaagctgatcaagttggtatttgtattgatctcttttactttttccctgtagaagtagtagattggtttatccagaaagccctcatccggtcttgcggcaccaacaataaaagttaggaactcatccttaaagagagcatcgatataatctgtattatagttcattcttcttcctcaactcaattacaacagctcttatccctcaagtgctgcaaataagctttctccactattattctcttaatcccaaaccttctgaagttcatgggatttatttttaccccatcgcatattgacagctcaatgatttcatcgttttccacaagttccatgggaccgcatcttcccgaagacttatagttttccaccaatttccttagcttctgcggatcagacaaaatgcaggtcagctcctctcttccctctataacaaggccatttccatttttcaaaacctgttttgcaatgtttccgcttaagctgttcgcaagaataaatgtatttgcagcaaagcattcaaaatatacataactgtatgtttcaggacaattagaccacagaatgacacagtctatttccagttcccgcagcgtttctgtcatcgttttgcttccattttggaagcctacgggatagttaatgatatgatcgcattctttgtcttctttgcccaaatgatagaattgtatatccgtgcccttgtgcgctgcaatttgtgaggcgtaaaggaaatccgcccatcccttggtgctgatgggaagtccacaaaatgcaattctcagtttctcttggacaggcttccggtttcccctatactggcccagtgctttctgatgataaatgatgcgaatcttgttctttatccgcggaatggaatccccgatgatttcagttggacattccgaaggagcaataaatgtcattctatcaaggtattttatcaagaagtctcttctttcctctgcatgcctgtggaattcccaaactgtacagtttttacatttattctgtgatggtatgccaatgccgcaatatgtacccgaagaatccttcagcgtataagcatcacaaaccagataataatcatgcaaataaaagaatatctctgccgcatggatataatccagaatttcagaaagctctgatagttttatacttcttagatgatgaatatgtatcttcagcaacagattatcagagcctttaggactactcagaaaagaaaggagctgctttgtctcaaagagaccctccatctctccgtctatcacaacaccccaataatcgtacaactctaatcctgcaatttttttcgacacaggatagatataaacgtaagaaatgccgactgcgttaaacattttctggtgagaaagaatgaccttctccgttccgcccaacgaagtgaggatatttcctccggaaatagataggatatactttctattgcttaattgcatacacagcacctccacttttactttttatagattcgatagaaaagctttacctgtctgggcatagtcctcaattttgctttctaatacgaaactcaggtcatattcattgacaccttcgcacaaatccagccccagagaaccaaacaaagaagccactctgctgccaaggcccttcgccgcatcatataccaatgtcttactgtacagtacggataccgccgtggcatggaaagaattggaatatactttcgctgcattgcgaatcagccacacaaactctctcggccctgcatcgtacagcaaagttcctttgcttatcagcttttgcgcagtgggatgaatcacgtacaagggaatcccctcagattcggcataatgggcggccgctctttccaaattctcatttctggataatccatacagcaagacaaaccgacaggcttctgccacagattccggctttctcgcaaatacatcccacgcttctctgccaagcaaaaacacagggtcacagaccagttctgccccgatcccttcttcttcaagtatctttttcgcttgcgattctcttacagagattttcgaataaagcggaaggcattcatttaccgcattcttttgatatgtgcaaatactgtcagtgccaaaactggctgcataagaaattttatgagcctgtacttctttttctaaaaaatagctctttatatcgcctgtaatattggtgttccaaacttgatcgctgcccacggatacaacatcataggtattcatagcagtaatcagttcctcacttgttagaatccgttgcctcagcccaagctcgttattctggaactgggtaaagagtctattctgcttccgtctacgatagttacgcagagatagacttaacaacactttaagattctttgaataggcaaatgggttcattgagtattcttttctcaatttctccggcgtgtaattgatgatggaaacgtcgtatcccagttgatttaagtagcacttcagcgcatatgcctgaagcaaagcaccatagttatgggcaaattgaaaggttaaaattccgattttcatcatttattatcatcccaagtggggaactctccattttccagcagcacttcccgaatggcctcaagatacccagcaccatatcgttctgtcggctcaaggattccgccttctgcccattcattccatgcaaacatgacaagccaatcaattttatattctttctttgcatgttttacctgtaagtcaaaataaaatttaaatttctccggagaagcaccgatgtaaacatctccgcgttctcctttgcgcggcgtattatcccaatccacaaaggcaccgggaatgcaggtatcatcctggggatggattgccagaacctgtttccatttatcatcgtagctacttctgtgaacttcttttttcggaagcttgatataaatgtgcaatttattctgaagaaagagagacaacttcaccttaagtctaatccacatggcacctttttttcctctttcaaggtggttaatcatggaaggctgaaattcaattgcgtaatcaaatctgctcttatctacactgttgtccagatgccagaaggggctctgggaaataaacttaattcctggaagaccattctgcttggccagttcctgccatctgtcgagcatctccttgagcgagccgatgatgttgggaagatagatgacatacagaggctttccatcttctttgatgtatcgtttatcctgaaaaaaaggcagcatataatagaaatgattatcccagtcttccctgtcttcaaaattctgagccatcagaatcttgttttcaccggaaacccaagcattgctccaatgctcattggcccagcagaagcagaacgggaaatctaaagatttgtccgccaagtactgctccatgggcttctccagcaacgtcttaccacaaaaccagtaatgatagacacaaaaaccgtagattccgtgctcttttgccagatcaatctgccatctcttcacagaattatccaataaattatagtagttctcgttcaaaggtatccgtggctggtagtgtccctcaaacagtggctttgccttttttacgtttatccactcggtaaagcctttaccccaccattcatcattttccggaatggcatggaactggggcaaatataatgctaatatcttcatcattaactccttaattcgtcttttctttttctaacaattctggctggactaccagttgagaatagtcaccgatttctatgtttttccccgtaccaaagttctaaaaaacaaataatacagcattaagacgattttctgacatattttttcacactcattatcctctcataatcttttcatattgttctaacaaccattggcacttatttctgtataagtatgcttcattcatgcgctcataagcaatctttcccatctcaattcgcttttccttattttcaatcagaaaagcgataccttcagccatttcttccaccaaagcagcgtaaggtttcggctcaaccttaacagcataggcttcatctgtcatgcatttgacgcctccggtatttaagcatacaattggtaaaccgatactcattgcctccatagcaaccaagcaaccagagtctcgcagtgcagtattaatgagaacatcgtgttccttgtaaaattcggttattttctcatgtggcactttatcaacgaaacggattttttcacctatgtatttgatgcaactattcttgtattcactttcatatggtccatttcccagaattgtaaattgaacattgtcataatgattcacaagtttcagaattgcatcaacaccaatcctaacaccttttaagtacacaaactttccgcttaggagaacattcactgtatccgcattggtttgccgtttcattggtctgactttatcaattccaatggcagatgtaactacaaccttatcgtggtattcctccgggatcaaagcttctgtttctcctgttgtcgccattataagtgatgccttttttaccgcagctctaattctgggcgaatgctttgctttatactgtcccagagaccttataagctcatacattttttccttaaaggccatttgatatcctataaccgggttgatgttttctccgccagcaacggtccacacaaaaggtgcgtccagcttatataagaaacacggctgtgttaaagaaacaaatgttacactatgtacaatatcaaattttactgccttatgaagctcctttgcaattttatacgctttttttgcccataaataatagtatagccgcatgccgcgattgccttttttccaaaacaccatccatttgggcaaatgcacatataggaagttcatattatcccaaggaatatcctctgaagcgacagctctgttttcatctatcgtatgtctgttattttctttcgtcagaatccaaacttcgtgttttctggcaatattaactgcccattgccatcccacttctggttcagagcctttattcggctcacatgcatatgcagacaataatattttagacaacgctactcctcctcaagcctcaacccttcatgatcttccttgtatttttttcctgtttcttcagaatatgccctgttacctctgcaataacatcttctttctgtttggaggtatcaatcacaatcatattcacgtacttgtctttcagctttttgaactctgcacgctgtctttctatctcttcaatcgtcagttcttgctttctggcataaataatgtcacttggcgcatccaaaacaaagaccaagtcaggtcttggaatgatgtatcggaagcaccaggcccatttggaactgatagaatatctataccgcttcatatcgacaaaatagtcatagtaatagcggtcaaatataaccagcttctttttcatcttatccacatcaacttttaatatagttcctaagataaagtccaaattgtagaagagaaatctgagaagtgatttgcatttcccgtgaactaccacatcatgcggattttcgtttgatgttgcttcctcagaaggattcagtttattatagtgccccagatttttgaacaggtgtggccggaaatagtaattctcaatgccataaaagctacccgaacacgttacttggattccacttattacagtagacttaccagccccatccggtgacaaaaatgcaacagacagtccacatttatggagaactcttttagatggatagtttgataatataaacgcatttctcttaattttgtccagcaagcggaaattctttctgctcaatgcttttacagaattaaggattgtattgtaattatcatcaaagagggctgcattctctgtcagaatcatatcagcaataatttctgaagtcttctggccaaaattctcagatagtacccgtaaatccgcctcgacatagagactcatcatttttctcagatgttcttctgagaaatcgttttttaatgctctacgaacaataatatatctaagttcttcatacctgccagggatgaacatacctttatacagtcttttattcgaaagcaaatgctccgccaatagtgcattgtgtatcttcccttttgagatcaccctataaaaatccaattggagttgaaaaaacttcgttggagctggatatgacagtatgtaagtatattctccatagtcttgaacaatcttttgtgtgatcagcaacctcgtctctttggctacatccagaacgatcttgtccagatctttctcgttggcattcctatacatcatatcgatgtcagagggtatctcttccggcatcatctcatacttattctgaatgcagtaatccaaaccgctttcattaattaccttaaaaactttttccagaagcagcattttatgtctccttcgttacaacattataaattctttcaagctgccgataattatcctctggcagatactttgcttcatagtccattcttgcatttttcccgatgacggcaatctgatccggatcggcccacagctttcgaatagtctgctcaaagctatctacgcttcccagaggcactttgaatccattcacaccattgtagatagcttcctcagaaaaacccagatccgtggcaataagaccttttccaagactttccgcctcaatctccaccatagagcaaccttcataccaaatactcgggaacacaacaaactctgccttcttcacaatgctgaggcatttgtcgtgctgcgtatagcccaagaataatacattgtccttcgtttctgcccaagcccggaattcttcttccagtggaccaccgcccataaccaccagcggaatgtcctggattctgtcccatatctgcatcaggatacgtattcccttttcttctccaattctgccgtaaaagacaacataacgttcgggcaaatccgttgccaacatcacattcacaccggcgtcagcatccgggacaaaattatacttctttattattttgtttttatcaaatccaatattcttcagcaattgaatctgattttcattcaggcagatatatcgatcaatctgcttgtaaaagctctttcgtattctgtgatatgtaaatatacacgctacgataaaactctgcaaccgactccccttgaaacagccatatttgcacatgcgaaaatagtttccgtcaccgcattgattacaaagttcggtgcctcttaaagaggtagcacaggggcagataaatctggtatcatgcaatgttgcaacaacctttgcaccacttctttttgcagcatacaaaatcgatggtgaaagtaacgggaaaaaagtatgaatatgtacaatatccggtttctttgtttcaaccagctctttgacttttttgtaattcttaaaactccacaacattccaaaggctgcagaaagctttccgatgactccggtattatcgaattcatcgttcgacaccgtatatcgaacaacttcatgaccatgtttttccaacaatgccatctcgcttttgaaaacttgatcatcgccacttgctgaaccttttcgatgaaaattatgtattgccagtattttcattatctcattttccccgtcttaaaaaggcctcttcgtacatcccacatattctttcccacgtgtactgctcagcaacacgtttcttggctttcctgcccatctctgcaatttcatcagcgcccatcatatctgccctatcaatcagctttgccagttcaccatcgtcccggctccagtacaaagcacaatcttctgcaacttctttgttgaaaccaacatgaaccaatagattcagatctgtgctgccgagagcttcgataagagaaggattcgtaccaccaactgtgtgaccatggaagtatgcataagcattctctcgaatctttttcaacagttcctgatcatacaccgttccaacgaacttgattctcttgtcactcataaaatgaagtttttcttcgagttcatttagaaacttgtcattgacatttgtgataatagcaaagtccttcttgctgctactccgcataaactcacgaatcatgatttcaaatgagttttctggcacaaagcgaccaacgacaaggtaatacccttttttcgtcagtcccttttccttataccatctcaccaacttctcgtcatcgtctgctagtttactgagagtcaaatcagcaccataggcaataaatgtggtcttggtatttcttcctttgattccctttccgtcatagcactcatggatgtacttctcgatatttacagaatcgcagatggcaagatcagaccacttgaccatcatctgctctgaaatcttccagtatttccgaatcagaacagaccacttggctctcatccattcatgtccatctggatttagataaaccatgccgccgagcttatgtatttccttataaaagtgcttcatgaacggtccaatccgacaagccatgatatagacgattgcatgagaaattttctgctctctgataattttgcaacatttctttaaagccgccacgtcatagtaaatcgcctgtgcagaacctaatttttgaggaattctaatctgaaaacagtgtgcattatggtatgtaaattcatgctcgttaatgatttctgctcccgctgttgcatatgagtccatgcagccgtcaccatttgctttacatgccacatgatattttattctttcattattctggtggtattctgtcagcttattgataaatgtttcgtatccaccgtaagctccaaggcttttagctcccaccagaaatacatgttgtacttcactattctgcatggattctttccctcaaaacttaaatgtatcttttaatccaagccatttctgatctttatcgcttagattcaatctcacgccatctacactataaccttgagcacttgctgtgcctctatactctccttctactttcgaccactcaatgccaatctccgggtcattccaagccatgccgctctcatcattaggatgatagaagtcatcgcacttataacaaaactctgcggtatcgcttaacactagaaatccgtgtgcaaatcccctcggaatcagaaattgatttttattttcctcagtcagttcaatgccgtaccattttccgtaggtttcacttctgcttctcaaatccacagccacatcaaacacagaacctttgataactctgaccagtttcgtctgcggaaaatgcttttggaaatgtagaccgcgaagcacacctttcgtactcatagattgattgtcctgaacgaaatttatattgattccgttctcttccatatctctctggctataggtctccatgaaataaccacgcaaatcatcatgcacagcaggagtgattacgcaaagtcccttgataccgcctacgttcttttcaactcttatctgtcccatctttatccctcgaatctgtttttctttccaaacctctatcacttacagctgtgcttccttcagatatcggcttactgcatcctgccatgtgggtaacggttcaaatccattctccaccagtttactcttgtccagtctgctgttgaccgggcgggcggccttgctcaatccgtattcctctgtagtcacgggagtaactttcgttttcaacccatactgccgataaaactcacagcagaagtcataccagctgatgtatccagttttgcatcctgcattttcatctgggatttctgcattggtcgcatgataataaccgtatttctccgtctcgcacatatccactaaaagtcgagccaaatcgtatgtataggtcggatttccgatttggtcattgaccactcgcacctcatcatgtgtctttcccacgttaatcatggtcttgataaaattcttaccattcagaccaaacacccatgcaatacggacaataaagtatttttccaatgtctagctaaccgccaactcaccttccaactttgtctgaccgtatacattcagagacttgtagtcctcgcaatccggctgccatggctctgtaccctgaccatcgaacacatagtctgtagacaggtagagcatcttactttcaatctctttacaggcatctgcaatattctgagttccacctgcattgacagcacgaactttttcaaccttgtcatcatcctctgccatatccaccgctgtccatgcggcacagtgaagcacagcgtccggtctgatttgctctataatcctctgcacagtttctttatcagtaatatccaatccaacatagggcatcgctgtcaccgcagaaccatccgcaacaccgctgtattttgattgaatatcggacccaactccctcatgccctcttttatgtaattcattcatgacatcgtggccaagttgaccatttacaactgttacaaaaaacttcatctttccacaacctctctgctatccgttatacctcggccttcgccctatacatttcctcataatatctctggtaatttccgctggtcacattgttcatccaatcttcgtgctccagataccagtcaatagtcaaaacaatgcccttctcaaacggtgtctctggataccagccaaggtcatttttgattttggtagggtcgataccatagcggcggtcgtggccaagccggtcttccacatgcttaatcaacgcctcggaaatccctttgtccttcagccggtcatgcagctgctcaatgatagtcttaacaatgaagatgttagggcactcgttatggccgcctatgttatagatttctccaatctttccgccgttcgcaaccatgtcaatggctttgcaatgatcttctacataaagccaatctcgaatctgcattccatcgccgtacactggaagctgcttatgatgtttcacattgttaatcatcaacgggatcagtttctctgggaactgattcgggccatagttgttggaacagcgggtgatgttaatcggcatgccataggtatcgtggaatgccttcacgaaatggtctgcgcttgcctttgaggaagaatatgggctatgaggattaatcggagtggtctccatgaaatacccgtctgctcccagtgcgccatatacctcatcagtagaaacctgcagatacttcttgccttctttccatatcttattggcagagtcataccatgcttcttttgctctttggagcaaattaactgtgcccattacattggtctcgacaaagatttcaggatttgcaatagaacgatccacatgggactctgctgcaaagttgattacataatcaaagtcatatttctcaaacagagaagccacgagttccttatcgcaaatatctccctgcacaaacacatgacgaaaatcaccctctactcctttgagattctccagattgcccgcgtaagtgagcttgtccatgttgaccagcaaaatgtcttcatactttttcagcatatagtaaacaaaattggaaccgatgaatccggcacagccagtaatcaaatatttcttcacttttatgtactcctctgtttcttatatttctatctccgttgccagatttttctaatatcaagcacttaagtacccctaataagttttccctatttcccttttaatttttcaacctcatccagaatgaatttcactgacaaatgccctcggaaattccacgtttttatccatcgaatccccaaggacacccaccggaacagccttctccactcttacttattcttatacaccaccgtaaacgccgtatcgctccccagcgtcaccgtcacctgttttgtcgcataatcaatcgctgcaggagccataaactcccactttttcgtcactgtgttataatagagcagctgcacgtcattcagtccttccaccagattcggcacatataaactgacggtaactttttcctctaattttgtctgagtggcagcatctgtcaccacaagtgtctgaaccggaattaatgggttataaccaactgtctccggcgtgccgatagcccggtagagcggagttgttcccgagttaattgtgttaatcgtctctacaaccgtctgggaaaagcgctccttcacttcctcattggacgcaaaacggacttccgtatttccgactgtaatggaattgccggctgaaccgccgcctgcggttccacctgtcgccgttccgcctgttgtcgatccgcctactaaacctccgcttccggtcgctgctcctgtaattcctgtgccttcgctgccagtcttatcaagcggctttgaactcgcattactgtcatcccgatcctttgacggtgtcaccaccggctttgtattcgggcttggatttaccgctccctgggccgccaacggctgtgccgtcatcattgctgccaaaataaaaccaatatacctttttttcataacaaaactcctcgtataataagtttgtaagcaagaaaaaccgcttacagacttattcttttttgggtataaatggtaaggatatctaagaggtactcccctcatcccgattcccatctatacagttgatagttacatttcaatataggtagatcctgtggtatgatatcaggtagagtctgatgtccgaaggcactgcttctcctcctttcagccggcttcgtccgagactgctttgaaagcattcagcctggcacatacggcacattccgctgacacagaattttcatccccagccgttagccccagcaaaaaaggctgactgggtgcatgctcattgcgcgagggttcggtcaccgtatgcggcacaggataaaccttttgcttcaggcttcacaaatccccatcggaatggaggtgatatcatgttaaagctcaactatatgtccaccttgtttgtaggtattgatgtaagctcaaagaccaatgccgtctatgccatggactttgaggaaaacaaatacatctcatcgtcgtttggcaataaccagccaggcgccgatcagcttgtaaatatgattgccgaatgcatgcagaagcataaaaacctggatacggttcttatcgtgctggaatctacttctgtatacagcgtgcatatttcaaacttcctgtcggccagcgaggttctcatgccctacaggccttacgtattctgtgtaaacccaaaggccgcttcgaattaccgaaaatcctatatcggaatggaaaagaccgatcccacggatgcatatctcatcgcggacttcggcagggtaggccgcacgaaaaaactggagccatggcgcggcgggcagttcatatccctgaaacgccttacaaggcaccgtatgcacctttctgagtgcatcaccagggagaagacttatatggtttcgaatctttatctgaagttcagtgaacttcagctccttgaaggtgatgacaagccttttggcagtctctatggtgccacgtcctcagctgtcctgacggaatttttgtctccgcaggagattatcgatatgccggaagaggatctgcttaccttccttgcggggaagagcaggaaccgcatctctgacctatcaaaaacttcggaactcctgcgcaaggcagccagggattcctaccggttagacaagtgcatgtatgaaccactgagcatatcactggcaagctcgtttaactgcatccacgcctatcagaaagaaatcaagctgatcgagcaggcgattgagaaatgcatcaacggaatgaaccctaacgccctgctcatccttcaatccatacctggaataggtccgatatgggcatccggaattctatcagaaataggcgatataaccgtgttccattcatccgatgcccttgccaaatatgccggcctttactggcctaagggtgattccggagatttcacttctgaggacaacaaaatgtcgaaagccggaaatccctatcttcgctgctatcttggcgaagcggcaaacagcgtcaggaagcacatccctgaatatgctgatttctatgccagaaaatatgctgaggtaaccaaacatcagcacaaaagagcactcgcgcttacatctcgtaaattagtacgactcgtttttggattgctggtcaaaaaccaactgtacaccggcgaaaagctggacaccgaatataatattgagtcgaactgacattcggttatacgtaaaatataccgaaggtctgttaaagttacccttttttctgaaaaacatatcaaaatcttcttcaaaaagttcttgacatatcaccagaatgctttctaatctgctttaaccgaacattccaactttaattctcaagactttatttctttataaaacatctgaattacgagttcttttaatttttcttcatccggatggaattcctcatataagtccgtctggaccgcttcccccggcagggcgataaaatctccgtcattcatgacctgagggctgtttaataccgccagggccatatccatatactgatccttggccatatcggtaatcatatatttttccacatcatccatcagcctgacaatcaactggtcatcttctttagctctgcgcttagccgtttcaagatacgattttatgtatcccttctgacgctccagccgtgtcagcgccgtctgatgctgattgatatctcggtagcggatgtaatgttccgcctgctctccttttaacagaaccgtctctcccatggcaaactccggatacttttcggccagggcttcgtcttctatcagaacctctacacctccgatttcatcattcagaatttgaaccgtactgatatttgttgcaaaatagctatctatcttcaggccgaacatcaaatctgaaaccgcctctgtcataagctcacagctttgctcccttccatctccgtaggcgtaggctaaggctaaatgctgaacatcttttcccagttcatttccgaaataatcaaataatgtaatttccgtcatggtatccctgggaatcatcaggatttgcactgtatccgtggctgcattttgagccacaagaaatataccgtctgcctgtcctccctcgcctgaaacctggtggcgctccatctcacctgtcgtgtcaacgccaagacagaggattgcgcgcattgccgtattccgcctgtatttcttcccgttgtattccaaaacatttttcgccggtgaaccgatagcttcaacagctctcccattttcctgttccagaatccgtgcctcggtatcctgccgttgccggtacatcccccagctaaaccagaaaaaccatatgagaaagaaggcaccggcggccgcaaagaaagggagtgcacccttccatctgctactatttcttctattgcttctatttcttccacctcttccgtctcttctccccatcaggacgcccccttctggaacagaaccacatacacggtctggaagagcagcttgatatccagccagaacgaccaattatctatgtattccagatccagatttacaatttcctcgaaatcactgaccgagtttctcccgctgacctgccacatccccgtaattcccggtttcaggctgaggcgcctcttatggcgttctgaatatttaacaaattcatcctccgtcggaggccgtgttccaaccaggctcatgtcccccgccaggacgttaaagaactgcggaaattcatccaggctggtcttgcgtataaatttaccaactctggtgatcctggggtcatccttgattttaaacatcaggccgttcatctcattctttgccatcagttctttctttcgctcctccgcatccatatacatggaacggaatttatagatggtaaaacggcgtccgtttttcccaatcctggtctgcttaaatatcacaggccccggcgactccagatatatcatcggcgcaatgacaattccgatcagaatggtcagaataacgccggccagcccgccggcaatgtccaccgcccgttttaaaatcagctccgcaggctcgaatattctgggactgtaggtaaggacattgtaaattccaaactcttcaactgccttctcctcccggccgagacagaaggtattcgttgtcacatgggtgacaattcccagattctccatatataaaatcagctcaatcagccactgccttctcgactgcggcatactcacgagggcctcgtcaattgcctccctcatcagaaactcttcaaggcatttttccgatgattccatataacttccgtttttcccacggagaatgcggtttatctccacatgcagactgcctttatcacggtggccgctgataaccacaagcgctacggcctcgtaatcatacatataagagctaacatatttatgcatcattttcatcgcattttcctcattggcaaaaaggattagcttctttctgttttctgttttcctataataatcatagagaaaagacttcagcaaaaaatgggccgtatacataaatgcagtgtttacaatgaagaaaataagatagaacgagcgcggaaacttcgttcccaccttgaataaatacagcagcagcgccagtcctaaggccatctgaaaattgactttacaaacgacttccagttcattccaattattccgtttcatcagtggcttctttacctgataaaacagggtgacaagaaagtatacacatatcaccagaacacaccggtaccacagttccgacggcgtaattcccggaagggcgccctctctgagaagcgatgtcacaatataggaaaaaataaccatcagtgtatctaaaaccatataaaatgcacggtttctgacaatcatactttgttcctctgatttcttttgtttatcctgcaggaacgtcccgccggtttttcagcgcagttttggagcctgcttgtatttatttcttattttcacggccgtaaccatagccatatacgtaatgatatctcccgtattttccgtaataccggtaatatccctgcacctgcatattgacacggttcaaaaccgttcccagaatccggcagccgctgcgttccaactgtctcttcaccttttggagaactctgtagctgacacccccgctctccaccaccataattgccccatcacagtgaccggccacaattgctccgtctatgatggtactcatcggcggcgtgtctataatgacataggcatattcctcccttgcatggtcgatcagttttttaaacaacggttcttccagtagttccgccgggttgggcgaaagggggccggaaaaaataacgtccagattcggtatattggtcgtataaatcacttcctccagctttttctgtccgctcagatactgggacagcccctcaatcttccggtccagcttatatctggtcacaaaaacggattttctgacatccgcatcaatcaaaagtactctattatcaatctgggccagtgaggaggccaatgaaaatgatatctcactcttaccctcattcggcaccgcgctggtcagcatgatgacctgtaaattcgtacctgaaaattgaatattcgttctcagggttttaatcgcctcttcgtactggtaatcctctttctgatcacgcattaagctgatttccttacccatttcgtctctccttaccgatttttctaactgttttcggttttatctttcaaagctgctgccggtagctcctggtctgttttttcaggctgccttgtctcctccggcgttttgcgtgtaatttcagcctttttcctggagccgcgcttcacggacacttttttctttcttccaaagaaccggcctgaagagctgcttctttccactttcgaatccttccgctccggaacaacagccaataccggaagctccaaatatttaaagacgtcctcctccgatctgattgtgtcgttcatgataacgctcaatgtaataacgccacaggccagaaccagcatcaccaggccgccgactgccgcattctttttcacattcggactggtctgcaccgtcgctaccataccgtcctcaatcagcttgggcggcgtcatctccataatctctccgatatagtctgaggcagcattggctatctcatctacaatcgcttttgccatataaggatttggatccgtcacagtcaaatacaggattcgcgtgtccttcggattttctaatttcagcttttccgccagctgcctgtaagtgatatccagattcaatgtgttgattacttcctgcataaccggcctgctgccaatcagttccttataatcctgggtgagctgcgttcccatctgcagatccgccagcgaggtcagtgtagtttcttttgacaaaacatagatttttgcctccgaaatatactgtggtgtcaaaagatagtagctatatgcccctgccgctccggttccaagaacggccgccaataatatccaccagattctccgtttgaactcgtaaaataattcccgaaagtcaatcactatttcatcatcatcaagatgttggtgcgtaatcttttccatgtcctattcctttttcctcttttgttttaaccatatttatatccgtaaaccgtccagaagtttcccagggttttcgatcgtaagctctctgatgcgttcctctcccgctctctttctcagccacgctaatgtcatttcgcagtccggtgttctgacatccgctccatgcatatcggtgcttagaaagtgaaagttgtcctccagtaccattttccggcaccagcgcctgtcggaataattctttcctgtttccaggctctgataattcatctgcatacggaccccggccgccgccagttcctccagcctcccattctttctcaggcaaaaatagcgctccgcatgggcaagcacaggaatgtaaccggcaaatatcattctccgcatcgctaattccaatctgctgtaaacaacggacggcaaaaattcgattaatacatatcttgttccagccagaggtatcactttcttttcaagcaaaaactcctcaatttcataaaaatgcataatttcctgtccgggataaattctcagcccgggagtcagggtatcggcctcagcctgaactgcgctaaccagctcataaatctgtctgacttccggctcatagtgcctgcgaaaataatgcggagtggcaataatactgcgtattccctgttcgaatgcctttcgcagcatccggcgggtctcctccattgtctccggcccgtcgtcaattccgggtaatatatgcgcatgaatatctgtcatctccatactacttgctcctgtccgaaccgtctttgtgtaggaatttctgtttttcctcaaagacagttctgcaaaaacttatgtattctgccatattctgcttttgtatttcctcgtctgctgccttcaatccagatgtctcaggcctccggcactcaatgagcagctcctgcccatccggccatggtgaatcctcaattacaatcttcatcctgtgtttccctttgcaatgttaggcttgactgtattgaatttttatttttggtgccactacataatgtggattatgttcctgaattggatataaaaagaacaacataatgtggattatgtttccgagatacgaaaaaaagatattataaatgaaaaagacactggcatatccaggttaatatgatattaaatccggattagctaaatcaaacagcagataaaattatacttttaaaatacgcaggatatggtataatgggagagactggaaaaccagatggaaaattttagaaaaaaaggtaatttatgttgagaaatagaaatcatcaatagactagtataaaaagatgcttttttttgttatattcttaatattaatagtttatttttttaaattgaaattatggacttaattgtttttttgttatatactactacataatccacattatgttgcacttaatagttctgcgacaaatcttataatatcagattcatccgttctatctgctttttgtgttccgttcccgatgatacaatatatatcctggttgtattgatactgctgtggcccagaagatccgccaatttcgaaatatctttctccattctgtaatatgttctggcaaaaagatgtctcaaattgtggggaaataccttgacggctaatactctggccgatgcgcacagcgctttcatctccttccagacattactccggttaaccggcttaccttctcttgtaaggaatacggggccctgacggatttggttctgtctgatatatttcatcagcagcattctgagcttatggggaagaaaaatctgacggctcttgcctttacacgtggcataggcaactccggtatgcacagaatcaacagtgatatagataagttcgctgattcgtatcccggtgctgcagatcgtttgtatgataaggccaattcggtcttttttcattaattttgccgtattcaccagtctgtaatactcctctttcgtaagttccttttcctccgggcaataaacctgcctctgtaattttatttgttttactttgaattcaagccagccggcaaactgcataaaatggttcagcgaagccagcatggaattgacgctggttgccgcatatctgtctgacaggctcttcttgtattcgataactaaatctttggtaacctcctgccctcccaggaattggacgaactttttgagatctctctggtacttctcaactgtgtggctgcttttttcttcctggatcaaatatcgtataaattggttttccatttcaacagttaatctgtattctttcatttttcctcctgctattatatttttactttctatattatcattatttggaggatatttttatggtttttattggaaattattcggaaatgatatctataggttatgatgttggggtcaaaaggtcttttgacccctttgataccggattgctccgcactgcgtgctctcacaaacctcaaaaacattcgcaatccgctcatttttctgcgaaaaatggcttcttactcatgtttttggcgggtcccaagattaaaaatcttcatgcaagcaagcttgcatcagatttccaaccttttgaccctggtatcaggttatttattaagaaggtggggacgctgccggaacggccagcggacggggtggtgggtgtgtatatgagtctttcgccccggggatggattgtcgtagtttggggctgcgggcgaagataaagtctgcggagcacacttccgctctgtgaaatgcatcgcgctgctaagctcgacaggacctcgcaaatcagcgatggatttaggcggcatccgcagactttatcttcccctccgccccagggccaggttttcgccgggacgaaagactccgctgggggtattggccccgtccgctggcctgcggcgctgaatgtctcacgcgttaagtgcgggggcggaacttgtcgcggccactcagcgcttccataaaggttatatatggcgacatgtggttgttgtttgagtatatttgtatatttgctgcatttgttttttataatatgttgtaataaattgatcggaatactggaagaatatcaccggattttacattggcctgccgggaacacgtagtggccgcgacaaggttctccccatttaagtttagagacaatcagcgcccggaacggaccgggtccggtgccgcgaaaacctccgcctgagtcttccgtccccggcgataacctggaccggggaagtaggcggaatcaattgcggaagggacatgggagtccgccggtgcttagcgaggtctctcacgagcttagcactgctgcgtactccaaagagtgcaaacggtccccgcagcaattcattccggccggattccccctcacgacaacctccaaccggggacggaagactcagacagccccctcaccgctcacagtccgttccggacacatcctccattcacaattaactctccgcatgcagtggtttaccaagaataaagccccaattgcccggctggattacaggataacaccaataggagcagatgtagcaatcaaagggcgcgaccatctcactcaccttgttgccaaacaaatcctcaatttcagaaagtacagtgccctccctgacaaattccataggtttcactttcactttgtggaaaccgccgtccagtgtatgcaggtaaagcgtttcaatctcgatatgttcgtcgagataggggacatctccctccagcatattaaactccatcattacgtttctgatacagtcggccgccatcgcaaccgcctccgctctgtgttcatggcggatacactggccgcccaattcgactgtgataccggccactccgtccgcataagcgttggactcctggaacccgcatccttcggcgctttccatggtttcgatccaaatcagttttgttccggtggcatatgccattctccggacaatatcattgcgctcctcgtcggcgccgcagggatacagagacagaggctcaatccaaagatgattgccgccgccatggaacgaaatggagagatcggcgtgtttcaggaagttctcccaatagtaatgggccaccttatgggtaatgaagctgctgggattgcccgggaaacagcggttcatatcctgatgggaccaatccagaggagcgctgcgttctccggcattaaacgattccaggttgagggcaggtataccgaccagagtgcctttcagtttctccggatcaagctctttataaagtttgattaatccttcggttccctcatattcatcgccatggcagcatgcctccaccagaagtgtcctaccctcctctttgcctgttacaatcatatacggaatgcggatgtccgatccgtcaaccttcttggcgatgttaacataaccgaactttttcgttcccctctcctgcaccagttcctcataattaaaatccttaagctccgtaatatccattgtctgttcctccatttcttaatttattattttattttatagctcaataaagttctgtatagattttcagtacccggtcaaaatctaacggtacgtaactgttagccatcagccttccctgtgtttctatcacgctcctggaaaattcgcccagatccgcccgggatactccatactcacgcagtctttttttcggtaaaaccttatttaataaatcctccaggcagtcaaaggcgcggctctcactgcagtgaatcagcccggcaagacggcggtacatcacggtgagttccccgccggaattcatctccatgtaatttttcatcaccccggtaaagatggcataattgctctccccgtggggcacatgatacattccgcccaaaggatatgccatggcatgaacggccgcacagcccgcggtaccgaaggagatgcctgcaaagttagaagcaatcagaaaatcttccatcagagcgttccggctctcaggaccgcttacagtcagtttttgatacccggaaaggatcatgtcgatggcctgatatccgaatgtcctggtgtatatggtagctttcggtgagagacaggactccaccgcatgaaccagcgcatcgatggaactggtggcaaacacgctgaacggcaggctgtcaagcagttccggaatcagtactgctttatccgcgtacatcgcctcactgacaagtcccatcttcgtccccatacgggttcggttgaacactgccacattcgtcatctcactgccggtaccgcacgtggtcggcacaataatcagctcacagttcttcctaagttcaggcattgctctgtaaagctcatccatatccccgctctcagagccgaccgccatggctttggcgatgtctatgatcgtaccgccgccaatggcgatgatacgcttgtaccctcccagaccggcagcgtccgcaatgatttgctccgccataatatcagtgggttccccggttccgtaggtctcctgacagagcagcttgacgtcaagaccaagcggcccaaaatacggctcataaatatatcggttggttaacaccagatcttctccgcacagctgcagctctttggcaaattctttgcagctaccaaactgatgcagctccggcttcatcacaatttgtaccattttctcctccattctatcctctttaccgtaacagggataccagggcaagcgtgaccggctcaaagacgttgacaataaccagcactaaaacctcggcaatcaggaagggaagaatttcccgcgcaattttttcaagcggcatttcacccatgaccgaggccacaaacagacaggtgcctaccggaggagtaattgcgctgatgctcaggttcaggcacaggatgatgccgaactggatcgtgttgatattcatggccaccgctacgggaagcagcaaaggtgccagaatgacaagagcggctccgccatccataatacagccaatcagcagtaaaagcagattgataagcagcagggcaatgagcttgctgtgggacacggacaggatcgcagcggaaagctgctgcggcacctgggccagtgtcataatctttccgaagatgccggcggcggaaagcaggataaaaatcgtggcgctggtaacggcggcctcagcggcacagtccatcaggctcttcagatttaaagtgcgttcgataaaaaggccaacaatcatggcatagacacaggctacggcgccggcctccgtcggtgtgaagactccggaatagatgccgcccagaatgatgaccggaaccatgatggcccactttgcgtcaaacaaggtgtgaaggaatgcggagatactgaacttgttcccctttcccttcagcccttccgctctcgcagttatggagacggcgatgcacaggaatacggccattaaaataccgggaacaataccggccagaaacagctcgcccacaccaacgccgcacgctacgccatagaggacaaacatattactgggaggaattacgggtccgatgacgccgcccgccgccgcaatagccagggcctggggcttgcggtagccctgcgcttccatctccggcaccatcatggaaccgatcgaagcacaggtggctgaggcagaaccgctgagggcggcaaagaaagcagaggtcacaatcgtaaccatgccctgtccgccggtaaaacggccgaacatcgtatcaatccatttacacagctttctggagattcctccccgggtcatgacagaaccggcaaatatataaaaggcgatagccagcagaggataggaaaacagtgagttcatggcggccgcggcgactgtgctgagtggagccagctgcagaatgaagcagcttattatcgaggaaaggaccagcgcgaacgcaaccggaaccttcaagatgattaatacaaaaaacaggccgagaatcaatgctgtattcatgtgttcgtctcctccttaatgatttcttctatggagcgctcatcatttttgccgcgcagtgtatccatcatggcaagaatgattcgaatcgtcatcagaatcattccgacgggtattgagattgacgcgatccaataaggatagcctccgcctaaagaaacggccttatgtgcgatataccccgaagtgacgacgtaccccagatagattaagaacagggcgcagatcatccacaggatatcggcaatcagagaaatcaccttctggacaggctttggcataaatcctacgaagagcccgacccggacgtgcttgcgctcattggctgcggcgctggctcccagatatgcgatccacaccatgcaaaaaagcataaattcctctgcccaggccagaggcacctgcaggacaaagcggcagataacggaaacgaatcccataacaatcaacacgatcagaattaatcccaggatcattctttcaatctgattataaatttggtatatttttttcattcagccctcctataaaaacacagcaaaataagtttttaccgggcgcggtactcctccagccactgtgtacactgatcccatacctcagccccgatatcctcccgcattttatcgtagcaatatgcctctaccttctccacgaaacgctggtaatccgcctcggaaacctcgttcacctcaacgccctcagcctctatctcggcgtagacacttgcctttatctcgggacttaccacattctgacaatactcttccgtacgtttggcggcttttgccagagcgtccctcagatcctgcggatagctttcaagtgatttcgaattccagatcagcgtcatgcccaggtttgtaatgctcatctttgtatggtacttggtaacttcgcacagcttatcggccacaaagctggaagtcgtggtgtaggtaccgtcaatggcgccctgctgcagactggtatatacttcgctgaatgccattgccacaggcagacctccgcaggcctccacaaaattgtacgggccaggagagtcgtacacgcggattttcaagccgaccatatcctcgggagtagtgacgggacgtttggtattctcaatttcctgtcccatgaaatactcaaagaacattgttgtaaaaccgtagggctcacattctttgttaatcatatcccggtaccactcgttggtagccgcgtacaattcgtcctgatctttgaacagaaacgggacatcctgcagacggaccgcgttcataggagcaaacgccgtgatgttggagggaccctgcagtgaggcatccagaccgccgttcatgaccatctcgcccagctcacgctcagaccccatcgagctgttggtgtagttgacccactccacacggccgggcagaatttcatccacctgatcctgaaaataatagatcagatcctgcattgggtctccatccacattggtagtggcaatgctgatcttaaccttctcaccggaagaacctcctccggtatcgactgctggagccgtaccgcctccatccgcggctgtcggggccgtaccgctgctgcttgtgccgcaggcagttaaagacagcaggaccgccaaagacagagtaaccgacaagatttgacgcatttttcgtttcatttttcttcttcctttcttttttcgggtgccagtcatttgactgatttatcaaccctttttattaaaaatatacaaaaaatgacaaattgtccaatatatatactgtcatacttcacataccatttttggtatgatatactgaactgggaaattatcacgtgaaaacgctttagactgtcattattcatcagtacactaagagggggagcaaatttaatgaatgaaaaagattttcagtatattctgactgtcgcacaatgcggaagtttcagccgtgcggcagagacactttatgtctctcagccttccttaagccgctatatcagcacactggaaaaaagattggggaccaccttatttgaccggagcactacgcccgttcagttaacggcagccggaactattttctgtaattacggtaaaaagatcctcaacctggaaacggctctgtatcgggagcttcaggaacaaaacgcactggaagagcgtatcctccgggtcggagtcccccatatcagcggagattacattctgtcacgcattctgccgcggatgacaaagaaatatccgtttctgcggattgacccgatttcagactacagctataacctgtaccatcagctggctgcccagaaaatagacattgcctgtgtcgccgcccccaataccgatccttcgattatggtcgaattgcttttatatgagccggtgctgctaatcggcgcaaaatctcatccggcgctggaaaattatgacattacccatgtagatatcgagcatcccattttcatcaatgtttcagaactgaatgacatccccatgatccaatataaaaacagctacgcagaagcggcgttacgtcagaaatcctatgcgcctaaatcggtcataaaggcctcgtcggctcccctggctctcgaactggccgcaaagggcgtgggcttcaccagcgtgatccgcagtcagctcaaatacgggcggctaatcatcacccagtccctgtgccccatttcgatcggagactgcaagctgcctatctatctggcttacaacaaactggccgataaagcaattccggaaataaatcggtttatccaggaggttaaagaggagtactgcgatgcgtccggactgtgacgggatggccggacgaacggcaacctgcagggaccgcgcaaaggtaaccgtcatcaaaaaaggaacagatgccgcatctgacgattgcatctgttcctttattctcttctcaatagaagacacatcttattcttttatgtccttcccatctcctttctgtttcagcatgaatgtataacgtctcctgaaacattttgtatattagcgataacctgcacgctccgcgcaaaggtcaccgccctcaataaaaaatgcagcccgattgcattttctattttacttaactgctcctgtcctttcccgctttttccggcagaggccgattgcccttgttttcacatatatgaaagactggttatgagtgagcacggataagaacagataaatcattcccccggtaacaagctgtaccgacagcttcaaaaaattgccaagcggcaagcctcctgctaaaaaaacacagcatcccatcaccccgctcatccacagcgccgggaatatatcggccagctgcatccgaaatggataatttaaaagcgatttattcggaaaggaatttaccagcagtgaaaaaatcgaaagcggcaatgcacataccgctactgcgaatacgccatatcttatcgaccaaatcagacagataaccgtaacggcctttttaattatctccagctttaagccgatatcgcttcttcccattgcctgaatcacctgcaggttcgccgtatgcagcggccagaacgcatagctgaaacatccaatccacatgtaggggaccgctgccgaccacacatccgtatataacagctgaaccagagtggacgagacaaccgcaagtcccgtcattgcaggaaaaatcaggtaagtgctgatggagatcgatttccggaccaattcccgcagctttgatttatcaccgattgcggacgaatatgcaggaaagaaaacgctctgtattgaggtattcacatttgatatgattaattccggcagatggtttccgcggttatagaatgccaaatccgactgggtgtatactttgccaatcagcaggcttctcaggttcttgtagaatgtatctattaaatttgacacaaatactttccacccaaatgaaaacaggggtttaaaccgctgaaaggagaactgaaaccgcggatgccagtcaagcatcttccacaggataaccgtgtccatcagctggttcgtcaaaatctgtccggctaaggcccataccccgaaacctgcatatgccatacctacaccgacaaaggcggagcagaccgttccgccaatcgtagccctgaaaaacaagtggaaccacattttttttgaaatataggcctgttgtattccattgatgcctcccaggacaacagttagggataagacccggattaccgggagcatctgaggcatttcataaaacttcgccaccgccggggcggagaaaaacaggcctgtatacagtacgagggacatgcagatattaaagacaaatactgtcgtaaaatccagatcgtccgccctttgtttctgaatcagagccgtcgataaaccgctgctgacaaatacattcaaaatatttgtgataacggtgattaatgcaaccgttccataaacagagggttccagcagtctggcgaggactaccgaaacaataaaactgactccctgggccccaaagcgttctgccagacgccataagatattcgtagaaatagaagtactgtcatttgtatttttcatcattctgtctctctgccgtcatctccgtaaataattgtttccatttatcccggattaggttgatatccgtatatttgcgaatcaatgccatgtttttttctttttttacaggatcataataacggaaggtatcgaatgtctcttctgaaagagtaaaggcattttcaatccggaaccctcttccctcataattcccccacatcgtcgtatcattgcggatatagattttcactcctgaagccagggcaatggcgatgtttcccatagcctgctgtctgtcattataaaagataccgatatccatatcgctgataaactccgaatatgcctcgccgtccatagactccgtgacgggaaccaccttatgttccccgaatattctgaccgcctcctgaaccaccatctcccggtattcctcatagcctttaaacccgtatgtaagaggaatatatagcttcatatcttccggcgcgaatgccgccagtttctgaagcgcatccatatggcagttggtcagggtcgcggagtttcccagcatcacctttaccgttttcttaccgaagcctttcttatttcctttatccgtaagcttctgcatcacgcccggacgctggatgggaagggggtagctcagagaaaaatgctttccgccaacatggtaccactggcgcgcaagcggcagatccttgtccacaagagtcgccacataaccaatctgacatgcatacttttgttttaagtattccgtcagcttcactccccagcggttcgatttttcattataacggtagatatcgccgccccagattacccagcatgtcttttccagccattcctttttacgggaaataaaaataaaatgtttgaaattaaataatccatgtaggataattgcatcacaggcatccagatttttaatatacctgatgaaatgtttcgggttaatgacctcggcgtttccttttgcctgatttaatccaatcggagctaaagaatcctttcgctttgcatgccctgtgcagaatttatgttctgttccgtcaaaacatgtattaatcaacatatacatatcctgtgtatacattgtctgagccataatatgtgtgatgttcatctctgcttcctttccgcgaatattaacttttcctaatacttatcttctaatcctccggtatagccagacagcggcatttacagcacagacagcagccgtaaatcctactgcatctaccagtacatcctggaatctcgcatttctgccgtttacaaagtactgatggaattcatccatgcacccgtagataaagcagagcaaagctgacagaaatgaacattttaatatctttatttctgtcagctcagtctgttttaacagcaggtaagcatgggtgactccgcccagcagggcaaaaagtgtaatgtgtccaagctgtcttatattccattcccagaaaagaaaccggccgtaaaattctccattttcatcttccctcaacacccctaagagtctccccgccgcattgctgagatagtgggaagaagctccggcctggcttgaaaagataaaaatgagaaacatgactccaatgacgcaaaacaaaagaaaattccgacgcatagcataaacctccagttttttcaaattgactacaatgggatattcccatgttttttccggagtatttttgctttccgcaatttctttttccgcagtgcatcatttaacaaggcaacgacagtctccctggtttcagacggcttaatcacttgatctatataccccatttcaaggccatgtttgtaattgataacctccgccttatattctgcttttttcttatctaaaaaatctgttttttcttttcccgacaggtttttcagctctttcgcatagagtatttcaaccgcgccgtcctcacccataaccgccacctcggcagtcggccatgctattacgtaatccgctcccagatgtttgctgttcatcgctatataggccccgccataggcttttctcagtataatattaatctttggaaccgtcgcctctgaaaaagcatacaaaagctttgctccatggcggataatgccctttgtttcctgagataccccaggcagatacccgggtacatccgtgaacgtgattaacggtatgccaaatgcatcacagaatctgacaaaccgcgccgctttatcacttgtatcacagtccaggcttcccgcaagacagcttggctgatttccgacgaccccgattgtggtctggcaaagggttgcaaacccgactactatcgacattgcgaattccgcagacacctccataaatgatccctcatccgccacggcccggattacgctcctgacatcatacccgatccgggtattctccggtatcgcaagctcagcttctgctttttcactgagttcttttctggggagcgcggtcttttcttcacagtttgccggcagcatggctatcagacggcggagctcctcaaaacacatctcctcatccggatagcagaaatgggatacgccgctttccctgttatggactttaaagcctcccagctcctctgccgttatattactgcctgtcacgcttttcactaccttcggtcccgtaatatacatctgcgcaatattctcaaccataaagacaaaatctgtaatccccggcgaatataccgcgccgccggcacaagggcctaaaatcacggaaatctgaggaataaaaccagatgccataacatttctgtagaatatttcaccataaccggccagcgaatcaatgccttcctggattcttgctcctccggaatcattgattgtaataaagggacatttttttgtaatcgcaatatcctgggctctggcaatattctctcctatttttctgcccagagttccgcctctgtatgtaaaatcctgagcagcaacaatcactttcttgccgctgatccgtccttcgcaaatcaatacgccgatccttcgtcccttgtctaagatctccttatatttaccttcatcaaataatttttcaagtcgttctgtcacaaacagtttcccttttgcatgctgtttttgctttgcagtttcgattttatttagctcgtccattcttatcctctgtatcttccgacaaaatataactatttcttttttcttacgaaccgtatgcggccggtaaacgtttctttcttctcttctttaaatacaaagaacagatatccgatcagcatccaaaattgagggtatccccaaaatgtgtccgacaggaataattttgcattggccgcaagcaggatacagatgacaaacgcctgctcttccctggctctgattaaaacctgtatacttctgacacagataatcaggaaaatgataattccaaacagccagccgaaatcaataatcagttccaggatgatattatggcaatatccccaatagtaatagggcgtgataaactgccgatccccgaatgcaccgtatcccagaaaaggcattgttttaacagccccggccgcaagtgcataaatcgcatccctgccgttatcgctggtaatatctccgctgaggaacatttgaatcgtcctcgcgtcaatccctgacagccatgataaaatatcataataaaacgcattgaacaggatcccagccagtaccgccccagcggttatcaaaatttttttatagacaggaacaacggaaaactctttaaaaagatagagtattccaaaaatgagaagacagagaacacagcctctggatccccctactaaagccagcacagtggatatgcagcctaacagcaggtaagttttttttctttccctgataaaaagtcccaaaaaaacagtggcacagaaaataacggtgtagccaaagccaaggttatagctctgctctatcgattcacccgcggcatttaaaaccgtccagtatccgtcactgacggccttaaggaactggtagatgctgtacagcagtaaaagcattgaagcgtatttaagattctctattaaccgcctgctgttcctgctggcagttacaaccagaaagccaaaaacagctccgctgtccggccggaacacatcctcccatgcaccatatgtctccctgaaaaagaagcggtcataatccggatggaaaaacagagtgagagcgaaaaaaaatactgttacacacagaaccagtaaaaagctccataacgatttatcaatctttcgttttgatatcatcagaaccagcacaagaataagcggcatatatatgattaagtttgcgaataaaatataggaactctgtaatctggcaacagccaaaaccctccttgcagccagtctgaccaagccatttgaaaaatacagacagataaaccaggtgatcgctttatcaaaatctatatgtacaaaattaaaacgaattttcagtttatccataaatatcgactccattactcatatatatcccggctccattctattcattcataaccaaacctgtacctgacggcagattctaatgtaaatccttataaagtatttttcccgattcatttttaggcagcttagcaatgaccgtcacgtcaaatgcagaagcatttaaattcaatttttctgccagaaagcccggaatttgatccttcagtgctccgtctacaatataaatcctcattttgtcatcatcgccggtgcaggcgcattcgcagttaaatttctctttgatgattcgttccgattgatccaggctgatacgaagaccaaagagcttcaaaaaccgtttttttctcccgattataaagtaatagccctccaaatcccgcttcgcaatatctcccgtgtggtactcaccgtcccactcatcacctttaagcaaatcctcccggcagattccgtatcccatcgtgacattcggtccgcggtaccccaattctccctgtgcctccggttcctctatctcatttccattcacatccaacaggaataattcaccttccggaattgccttgccgatgctgccggttttcagccgtgccatctccggcggcaaatatgccattctggcgcttgtctccgttgtgccgaatgtggcacaaaaacgcttgcccgctttctctgcgtattccgccagagccttgaacatatcatccgtcagttttccgccgccttccgataaggtccttaaatcaggcagaaccattctggtaaattttagtttcatcattatttcgtagctgtagggcacgcccgtgaagttcgtcccatgattttctttaataaagctccagaattccggactcatcagattatttttaatcagaagaaccgtggctcccacaatgagatggctgtttatgacattcagccccatggtatattgtaccggcagatccataatacagttttcgctgctcgtccatccgaatacggcggccacattcctggcattggcttccagattgccatacttataccgtaccagcttcgggctgccggttgagccggaagttgtcatcagcagtgcaagcctgtcatgaaccggatagacctcatagcctgttttcacaaggcagcagccatatccggaaaatatcacctcaccctttaagcgttccttctgtgtttcgggaatccagtaatagtgcggtgtgtacatagcatccaattcttctaacaaagaggcgtcaatggatgcgcttaacagcagcggaacaaccctgatgctttcaaacgcggcaattcccgcaagtattcccgccgtattctcacacaggcagaatataatgctgcgcggcagttgcagcgcttccatctcactgataaaatcgcacaattccccataggtaagctgagtcccgctgtcatcatggattgctgtcttttttctttcaatgctttcaatatttaaaaacatagtaaacctccgcctttacattattgtgcagccgtcaacagcaagaacctgtccggatacatagcccgacaaatcggatgcaaaaaacacacatgcctgggctatgtcccttggtttggccggtctccccatacagatattcttaattctggcctccagtttttcctgatccgcctgttccatcattggtgtctgtgtaagtcccggagcaatggcattcactctgatctttttaccggccagttctttggcggctgatttggtgagcgataccacggcgcccttagtcgctgagtatacaagctgtccgcggtttccccggagccctaccatggaagagatattgattatgcttcctccctccggctgcctgcccattactctggcagccgtctgaagcatattaatggttcctatcacattgacacttagcatcaaatccatattttttctgctgatcatgccaatcagctcattgaattccacgcctgcgttattgataaggacatcgatgcgtccgctctcttttttaatccccatcacggccgccttcaccgccgattcatcggttatgtcaaagtaggaggcatatatctttccgggccgtccggctcccgcttccgaaagccagccgtccatgcatccctcccttgcgtcattggcatagacagtcgccccaagttcggcaaacagctctgcaaccgctcttccgatccctctccccgcgcctgttatcagacagattttatgttcgagaagtctctccattttgctccacccttcctcagatttccactccgtttcttctcaatatttctaatccgttgagataggaaccgtaatgaaggatatcctctgtctcaagcattgtgtcaaaggtatcttccaattccgaaatcaggttcaggtgagccaccgaatcccatttctcaacttttccaaaaacaaaatcttctcccagctcgcttttatccaccgtaaaaacatgggcaaatatctcatcataaagttctctgttatccatttttatcctccgtagctgctgcctgtggcttctttacttcatgcaatccagtatgtctgccaccgtctggaactttttaacaatatctccggtaagctttaccccgcactcgtcatccatcatgacaatcagagataattttgccattgaatcgtactcttctatatccgacagcatcatttccggtgcaagggttccctcgtccaaatccagtgtttcttccagcagcgccaatttttctttttcactcatcatcatttcctcctgttgtatgttttattaaattccgccgtccggccgcactcttctgccccggcaattcaggacgtagtcatgccgccgtccaccggcaaagtgatacctgtgataaaacgggccgcagggctcatcagaaatgcaattgcatttgcaatatcatccggttttcccacccccatgtactggcgttccagaatttcccggctgatccggctgtccgccccgttctttttaatgaattcatggtacatctgcgtctccgtcatcgcaggcgccacggtattaatacagatgcctttgtccgccacttcttttgcaatacatcggacggaggcgtccatcgcagccttagagccggaataggcaagatgggctttatccccctgcagtgaagccaccgatgatactccgacaatacgcatcccttcgttatatcttccttttttgcagatttggcggactgcttcgataaaaccgaaatagttaatattaaacacttcccgtattttttcaggtttgaacagctttagtggcagtgacatcgcaattcccgccgcgtaaaccattccgtccagtctcccctgttcttctgcgatctgcttaaaaagcatttctatcctgtccgtctcacttaagtccgcagcgtaacaggcgttattattaccgtccagctcattcaatacttctttcagcttctcttcccttcttgcaaccaaaatcacgtctgctcccagcttcccaagcgtaagggccgtctgctttccgatgccggaggatgcccctgtaatcagaatctttctgccggtaaaatcaatgaaattcatcgctgtttctcctgtctcaatatgctcccggctcaaatttcccctccgcgtaaaaatcctttgttctgatgacgggaaatatcttccctgtgtccactgccgctgatgtcactccccaggacagcccgattccaaatccgctcatcaggatattctttttcccatcctctgtgtccccaaaatgatcgcagagtgtcagcggaatcgacatccctcccgtattgccgaaacgatccagtgagatcagaaccttttccttcggagccttcagcttgcgtgtaatctgctttaagataaaccggttggcctgatgaaaggccagacagtcataatcctcgattgcgctttccgttaagctgagatattctttcactgtctccggtacatctgttatggaaaaggagaagaccgaggtgccatccataaagatgtcatagagggatctctcgatcccgtcgctgcacataaacgtctcatcggagggattcatatcgcggaatcctcctgccggcaggacaatcgctttaaaccggtttccgtcgctctttaaaagagtcttcatgctggcgccttcttctctttttaacagaattgccgcaccggcatcgccgtacatcataacaatggatttgtcaagcggatttacaagtttcgatgcggtctcccctatcagcacaagcgcatactccatatctgatgaggccatcaaagaggcggccgtctgcagcccgtagacgaagccggaacagccaaggccgatatccatagcggcacagccgagtgacaggccaagccgtttctgtaacacgcaggccgtcgcaggtcttcggtaatccggcgactgcgtcacaaaaacaagggcgccgattttactgcgatccgtctctgtcttctcaaaaagattctcagcggcagcataagccagatcgcctgccgtctgttccggcagagccttatacatttcccggatccccgtactctctgtaaactttttacatgcctccgcaccgaaaacaggctcaaaactctgaacgggaaccaggttgtccggcacggcgcatgaaactgcctcgatttttatatcttttatctcaaaaaaagccattctatcttctccttcgtacaaactctttatagtgtccgggatagactataataccttccggcaaaccggcaagcctcccgctggaaatggttttccatttttcacggtcccctccggggaacccaagctccacctcatgttcctcaaacaggctgtctccggaaaagaaattgcagcggttcaccatgattccgatacttccgtccgaatggcccggcagggcaaataattcaaaaaaattatcctgccagtaaaactgcatctgatcatcaaatgtaaattcggcggtgcagcaataattcttttctatggatacatgttcatcctgtctggcgtaggtctgcatctggctgaatgcctcaaagtaccggctcatattcttcctggaagttccaatattgacggcacatgccctgctgcaaattaccggagcgccgtatgcgtctttccatgcattgactccggagatatgatcatagtgttcatgggtcaatatcagcgcatctgtcttcaggccggaaccgggagacgtatcacggcagggatcgatcacaaccgcatgtccgttttcagacagcagatacatattggatgccatcatatctgactcaaaccgtttgatctccatctgagcctccttataattcaaaccgcctggcgggattccccagcacccgcctttctcttcttaccttcgcaaaaaccgcgcttccggccgcaatgacagcgtcatcctctaccgtgatatggggaacaataaatgcatggcctccgattttcacccgccggcctatcttaacgtaaccggccagcccgcagccgcccatcacgcatgcgtagtcacccacctcggcatcatgtcccagtgtcgtgcacccgttaataaccacgccttttccgattttaatattcacagtcatcataacgccatgggcaatcacagaacctgcgccgacttttactgtactgtgaagttccacatccggtgaaatcaaggtttcaaactgaatgcccttttgttccagctcttcctgaatggcttcccgaggtcccggctcaccaatcgcacaggtacacaccacttcatttttatgggcaatcagccactgccttgtgccaagaaccggatagccgttgatctccaggccgtcccggtagtaagcatcgtcgacgataaagcccagcaattcataagcggctcttacattatttattctttctatcagataagcggtttcccgtgcaaagcctccggctccaaataatacaatttttttcatactaatctgcctctccgatgaactctccatcgattttctcacttcgaatgccggccctttttctgttgaacaccagcttaaaaagcctgcagatcatgatgcagtctgttttaaagctgatatgctccacataccaaacgtcattttccagccgttcctcccaggttaaatcggtttttgagtaatccggcagcggacattccagtccgggacggaccgcatggcgcaggtgctggcgttttgaataccgggggagatatttcatcagcagcggcctggggccgataatcgacatctttcctatgaatataagccagaactgcaaaagctcatcgagagaagtcttcctcagaaattttccaagctttgtaatccgctctgaggccggcagcaactcgccgttttcatctgtctcatttgtcatattccggaattttatcattttaaacggtctctctcccacgcccggcctctcatggatgaaaaaaacaggttttccgacatccataagggtggctgccgctatcaggatattaaccggcagcgtcagcagaattgcggccgatgagactatgatatcgattgcccgttttacatatcggatgtaaaatgtatgtttgatacgtatttcgcctgtcatgaagggacttataaacggctcttccaattctccataataatgcggaccttgttttacatctcccattcccaatccccctttcccggctgacgctccttcatttcttctttgggaaaccgtcacattctcagcgataaaatcataccgcatatccgatcgacatcctccatggccagatcagcgtacatgggaagtgtcaggatattttttgacacccgctctgctaccggtgtctccccatgggcaaatttacctttgtaggaatcgagatcgttcgtagccgggtagaaataccttctggagaaaatatcattttcacatagttttgtgtacacctcatcgcggttctttccaaactcttcctcatcaatatagagaggaaaataggagtaatttggctcaatctctttgttataagtgattaatgtaaggccgtttattcctgccagatggccgacatacctctcatacacttttttccgtttttggatttcctcgtccacatggcgaaggttacagattcccatggctgccctgaattcatccagctttgcatttccgcccacttcctcgataatatcctcagaagtaataccgaaattcttcagacaatgcagaggattttttaaattttcatcggaaaatgcgatggcgcctccctctatcgtgtggaataccttcgtcgcatgaaagctgaacatcgatgcatcaccgaaattcccaaccccaactcctttatatgtaacgccaaatgcatgtgccgcatcgtaaatcactttcagatgatgctttctggcaatccgctcgatcgactccacatcgcagatattgccgtatacgtggaccggtataatcgccgatgtcttctcggtaatcaactcctcaattttttcaggatccatcgtataatcatcgggtttaatatcacagaataccggtttcagcccatttctcactatcgcatgcgtcgtcgaaacaaatgtataaggagttgtgatcacctctcctgtcagctttaatgcctggattgcaatttcgagtgccatatggccgtttacaaagagagataactgcggaaccgacaggtaatccttcagctgatactggaaccgcttgtaaacgggtcccatgttggtcagccagtgactttcaaaaataggttttatctcctcgacaaattcatctaactccggcattgaagatctagtaactaaaatgctcatttgtatatcctcctgacccttcccttaatcctggttctcttctggtatcctatcggttcccatacattttttcatagtaattctgataatctccggagattatgctttcccaccatcgacggttttccagataccactgaatcgttttccgtattccgtcttcaaattttgtttccggctgccatccaagctcactgcttatcttctccgtgtcgattgcataccgcatatcatggcccttccgatctgccacatatgtaatcaggctctccggtttgcccagagcctggcaaatcattctgacaatatcgatatttctcatctcgttgtgtccgccgatattgtaaacctcgccgattcgccctttgtgaaggattaaatcgatggctttgcagtgatcttccacatacagccagtcgcggacgttcagcccttctccgtataccggcagcggtttatcggccagagcgtttacgatcatcaggggtatcagcttctccggaaaatggaagggcccatagttgttggaacagcggctgatggtcacggggaggccgtaggtccggtggtatacctgcaccagcaagtccgctccggccttagaggcgctgtatggagaactggtatgaataggagtgctttcagtaaaaaacaggtcaggccggttcagcggaagatctccgtaaacctcatctgtcgatacctgatggtatcgcaccatgccgaatttgcggcaggcatccatcaagactgccgtacctttgatgttggtatctaaaaagacctcgggttcttcaatcgaccggtccacatggctttccgcagcaaagttgacaaccatgtccggctgttctttttggaatacactgtaaacatcatttctttcgcagatgtcaaccttataaaaatgaaagtttgaattactcatcgctttttctaatgtggataaatttccggcataggtcaggcaatccacacagacaatctgatagtcaggatgcacgtccagcatgtggtagataaaattgcttccaataaaaccagctccgccggtcactataattttcatactctcttccctctttttcattcgtaaagaacatcaatatacttcccgtccagaacatccttcaggtattggccatactgattcttcttcatactctcgtaaaccgccagtacctcatcgcctgatatccagccgtttaaataggcgatctcttccaggcaggcgattttccggtgctggtggctctccactgtttttacaaagtttgtcgcatccaccaggctttcatgggtgccggtatccagccatgtgaagccctgccccagcagttccacattaagaagtccttcctctaaataaatccggttcagatctgtgatttccagttctcccctcccgctcggctttagctgtccggcataatccaccaccctgttgtcataaaagtacaggccagtaacacagtagttgctttttggttgttttggcttttcttcgatcgagactgcttttccatctctgtcaaactccactattccaaagcgctccggatcgtctacgtaatagccgaataccgttgcccctttgcctttttccgcattacggactgcgtttttcaatctttttttcaatccgtggccggcaaaaatgttatcacctaaaaccatcgcaactgtgtcatttcctataaaatctgcgccaatcaaaaatgcctgggccagtccgtccggggatgcctgaactgcatatttcagattcagtccaaaggcctttccatctcccagcagctcctgaaagcggggcgtatcctgcggtgtggaaataatcaggatttcccggatgcctgcctccatcagcacggacatcggataataaatcatcggcttgtcgtaaatcggcagcaattgtttagaagttactttcgtcagcgggtaaaggcgggtaccggaacctccggcaagaataatccctttcatcagttttcttctgtccttccgtttatttcatctatatttaattccgcgggcaacactcactattaaatatccatttcctattctaatgagtgtccccgtggaaatcaggcgctcgtattccttacctaaaaccgggaagctgccccaaaaatggcaggggcagtccctcagcttcactcacgaatgtttatttcttataaacaattgtaaatggggttgttccgcttaaagtaacggaaatttcttttgttgcataattaatgctggacggtgccatcagttcccaagtatgtgttgcctgattgtagtacaggatctgaacatcgttcagtccctctaccaggtttggaacatacatcgttactgtggtggagccgctgacaactgctgcctgtaccggcgccaaaggaacataaccaaccatgttgttagttccaattgtacggtacagaggttctactccggcattgatggtattaatctcttcgattacgtcccaggcaaatccggcattctcataaacagcccgatccgtgctgaacgcaactgaactgcctgcagtgccggtaggagctgcaccgttattcagttcgccactgatcattgattgtgtcgaactgctcatgttgtcacgagacggtgaaggcgtagacggcatactgccggctgccagagatgtaaacggctgagccatcaggacagcagcggttaacactcctgctaatttcctcttcatgtcacatcacccttcctttctttttagttttatcaataaatagcatttgctagttattgccgtaaggcatttgcatcatccgagttctgtcagatttccttgtagaacagttctatgatgattcgtttcaattcatccaggtccggataatactcatcaaaattaattgtttccactgcctggcccggtattgtcaaaaaatctttatctcccagctcctgctggctgttcaggaccgccatccccatatcgaggtactggtctttcgccatattggtaaccatatggttctctatggcattgacaagtcttgttatcagaccgctgtctttttccgactcttttttgaccgtttcaaagtaggcctgtatatactgctgctgcctgtccattctgctcagagccgtctgcggcttcgtaatatcgcggtaacgtacaaataattctgcctgactgccgtttaggtgtacgacactcccttttttcagcagcgggtcttttacttccagcccatcctcttctatcgtgacggtaactcctcccacctcgtcatttaagagggggatggaactaacattcattgcaagatatccgtccagacggattccaaagcataaatccgagacagcggccgcgagaagctcacagcttttctctctgccgtctccataggcaaatgcaagggtaaggtgctgaacatctttacccagctcattgcccattaaatcaaaaagcgttatctccgtcatcgtgtcccggggaatcattaaaatcctgaccgtatctctggccatatcctgcgccacaagaaaaaggccgtccgcctgccccgctactccggacgcggtttgctgctgcatatccccgctcgtatccacgccaatacagagaatcgcgcgaattgaagtgtttcttctgtatttttttccgtccagttcaattattccgtttgagggcgtcccggcaagtccggaggctttggctgcattcccggcctctgtcaatcgccacgctttctcctgtgcatagtaacggtatgacaacataaaaatggcagcggccgcacaaaacaccgccaatacaaccggccatttgcttattgcttttcgtttttcccggatttgttttttactatccggcgcttccttttcagccgggccgttcttaatgtcactcatctttcatttttctccatgacggctttctgccgcagccttgtattttggtaacagttcagccatgatgtattccgcgaggtgttttcgctgttttttgcgaaaatcccgagttgtgcggcgcgacgcgatgaaaagtaaacttttcaccacaatcaacggcgtttttgccgtttctgtgcatcatttgttacggtttagctgaaggctgaactgtaacatatttttaaagctctgtgcgtcttaatgctcgctgctatactcttttccataatatttcccgtattttccgtaataatagtaactgttttgtctgacgtccactttatttaacaccgcacccaaaatccggcatccgctcttttccaactggcctttcactttttgcagaaggcggtggctgatattgccgctctcaataaccagtatggctccgtcacagttccggcttataatcgcgccatcaatcaggtttcccatcggaggcgtatcgattatgacataatcaaaattctcccttgcccaggcaactaatttatcgaaaaggggttctgccaacagctctgccgggttcggagaatagggaccggaaaaaatcatggtcaaattaggcagattcgttttataaactacctcttccaattttttctggccgctcaggtattgggacagcccgtcaactctccggtccaattggtatcgtgtgacaaggatcgatttgcggatatcggcgtcaatcagaagaaccttcttatccagctgtgccagcgaggccgctaaatgaaaagtagtctcgctctttccctctccgggaacagaacttgtaagcataacaacctgaatacctgtgcctgaaaactggatattcgtacgaagtgttttcatcgcctcattgtactgataatcttctattgccgttctttttaaaaagacttcgttatccatttatctgctcctcctcttttggcccttttacttctttcctgatttcttccttcctggtttctcccttcctggtttctcccttacccggctctttcggtgatttatgtttttcttttttcttgcccttctctctctttttgggaataacagccaatacagggatactcaggtatctttcaacatcttcctcactcttgacggtgtcactaaagacaacacggaccgctatcaaggcacagattaaaaacaccgccaggattcctccaagtagtgcatttctctttatgctggggctgtagggctccgatgccaccacaccgtcctcaatcattttcggcggtaccatttccatgatttccccaatgtagtcggaagcggtatttgcgatatcatccacgatctgcttagccatatacggattctcatcacgcaccgttaaagacaggattcgcgtattctgcggattctccaccgtcagctttccggccagttctttgtaagaatagtctaatttgagatggttaataacaccctccataaccggccggctgctgaccaaaaccttgtagtcctgtgtaagctgactgccgatttgaagatctgccagagaagtcaaagttgtctccttcgataatatgtaaagcttcgcttctgatttatattgcggggttattagaaatgcgctgccggcgccggcaatgccgattccgagaaacagggccacaagaatcagccataacctttttttcagctcaaacagcagttcccggagatcaatctctatctcttctttgtcttctgtgtacatcttttccattttccagattccttttcttctttaaattaatcttatctatttccatcaagcaggaattgacttactaaaacagttccccattcaggagtttctttggctgataataggtcagccgctcaaaagtctcccttttgcagtcctttagcagccagtcaactgctttctttatttcaggcggcctgtagtccagccggtgcatatcggaacccagcagatgaatatttccttttttcactgcttttctgcaccagatacgatcaaccggatggttgattcccgacaggctgctgaaattcatctgcatataagctcctgcctgaatcagttcttcaatgcagccgcttttcctcagacaggtgaagcgttcaatatgagcgagtaccggaatataaccggccagagtcagctggcgtacggcctgatagatctctttatatgaaacagtagttgaaaactctatcagaacatatcttgtacccccagcgataaggcccttccggactgcagcgcttccacaataccatcgtggtagaatagttcttcgccggaatagattgttaaatccggggcaatttcgcctgccattttttttactttttctaaggcgtccagaatctggcctgcgctcattttattatgtctgtgcagataatgaggcgtggcaatcacactgcgtattccctgtgcatatgcttctttcagcataaaccgggtttcccccagatatctggaaccgtcatctgctttggggataatatgggcatggacatcgattatcccgtttactggctgcaacatagatacactccctacattaatagtgtcaggtgaaataacataatattgatatgtttttatggacaacaacataatatagattatgtcgtgaggatttgggatttttttattgctgcgtgaatagaataatgaaatttttttatagagttttgaaatatgggattttcacagacaggagatgggattttttgtaaataatggagttatttgtatttttagatacttcatttgggggagcaaaataaaaaacaactggtgataatattgcattatcgataggttattggtataatatgggaattaagggtaatgttatgaaaagtgaaaaatattaaattaataattaatttagatttttttaattttctaatagacgttttagatttttaggtgtataatacgacataatctatattatgtggtttctttctcaacataatctatattatgttgtaaataaaaagctttaccagcatttattctgattgctttcttatagcaggagtttcattcgatcaatttgccgcctgtgctcttcccccgatgatatgatataaatccttgttgtgttgatactgctgtgtcccagtaggtcggccagcttcgaaatgtctttttccatcttgtaataggtctttgcgaaaagatggcggaggttatggggaaagactttgttttctctcacatgcgctatctcacataggtttttcatctcccgccatacattactgcggttaatcgggttgccctgcttggttatgaatatgggaccctggcggatgtgctgcttctttatataggttaacagcatcatctttagcttatggggaatgaaaatttgccggctcttgcctttgcagtttacttcggccacgccgctttgcgccgctcggacggtaatacattccagttcgctgatccggattcctgtactgcagatggtctggattattaaggagaggcggtctttctgcaattcctgcgcggcttttatgaggcgatagtactcttcttttgaaagttccttttcctctgggcagtaaacccggcgttgttgtttgatttgcttgactttgcattcgtagagaccggcaaaatcgaaatagtgattcagtgaggccagcatggagttgatgctggcggtggcgtattgctgttttagttcctctttgtaggttatgaccaattccttggtgatggggcgaccggcggtgtaggtgaggaatttttggaggtcgcggaggtatttggtgatggtggtgggggatttttcttcggctagtaggtggtggtgataggtggttaatgtattatatgaaatgattttattttgggaaaacattttactattcctttctattactatttatattagcaatatgtgtgcaattcttaatcttattcacaaagaatcaaaaagtcgcttataataccttgccaaggtaattctgctagttattcaatacgattttcgtaaataactctttaataactataaatttcatcaatatcggcttttctatagtaagcgccaaatattagggtggctggtatttaactaccatttgcctcataatgagtatagctagatgcaagcatttcactcccaaatctcttttatgtttggatagatgctggcattttactacagaattatggaggtgttttaaacaatgtctacttacaataccagagtaccgaccgaccagcagtatcagctgatcatggaatgccggagtagcggcctcacggattaccagtggtgcaaagagcatgggatccatccgggtactttttacaactgggtaagccgcctgaggaagaaggcctgccatgaaataccggatccagtttccagggaacatcttggtcctcctgctgtgcaggaagtggtcaggctggacctcggtccaaaaccggtcagcaacccaaacagcgtgctgtctgtcggtacgattcaagaaataccgaaacaacaggccccacttgctaccatgatagaaatatctcttggccgggcaaccatccgcattgccaatggtacggaacctgccatgctggaccggatcctcagcctcgtgaaaggctccgtatgccaggcgatatttctgtggccaacaacatttacatcgtctgcgggaccacggatatgcgaaagtccattgatggactgtgcagttatcataagggataaactttccatggatccggatcagtcctctctgttcctgttctgtggaaaacgctgtgatcgcatcaaagtgctgctccacgaaccagatggatatgtgcttttatacaagcgtctcagtgtttcctagggacgttatcgttggccgcaaaaaagctcggaagctcaggccattacatggcgtcagctggactggctgctaaacgggcttgatatcgaacagcctaaagcgatccaggcctgacaaaaatccgttgtgaaattgctgaatttttcgagctgtttctcatccaggatcgtggataacaaatctgtgttttgggattttgcgaataagttcccgggaatccacagtttagcctgatatatcacagatccaagggcttatcctgtgactgaaagcacgttttctggtgctgatccgacaatcccggaaagttatccaccgtcattatgacgagagtgcgctccggcaggattcgctttttttcatgatttctggtaaaataccagtaataagaaaaggagtggcaagcccatggcacccagcgctaaggatatccagttcagggaactgaaggatacgatctcacaactgaatacgaccatccgtacccagaatgacctgatcctgtctctgcagcggatgctggaagaacgcaatgccagggatgacgaaaaggaccggatcattgcaaatctgcaggagcaggtcgagtatttcaagcagaaactttttggcagttccagtgagaaacgcaacgatcttcccgggcagctgaacctgttttcggaggctgtatccgaggaggaaccagagccggaactcatcgaaccggaattcattgaactgaaaaccggtaagaagaaacgtaagtccaaagcgagttatgacgagatgtttgctgatcttccagtctgccatgtggaggtggataccctgaccgaagagcaaaagcactgtccggtgtgtcagagccggatggtcccgatcggtcacgaggagatccggaccgagatccggtatacccgggcgaagctggaacgtgtcgtctatatcgcgaccacatatggctgccccgtctgcaaagaaacggaagaaccacagtttatcaaagacgaaggactccctgcattgatccctggcagctatgcgtcttcctcactggtgtcccacatcatgtacgaaaaatatgcagatgcgcttcctctgtaccgacaggaaaaaggctttgaacttctcggtgtcagcatcagccggactacgatggccggctggatcatcacctgcgcacgggattatctgcagccggtgtatgactacttccacagacagctgttggaaagacactttcttatggcagacgaaacacccatccaggtgttaaaggaaccagaccgccggccccatagcaagtcctacgtctggctgatgctttccggggaagaccggctgccgcctatcatcctgtatcactacacggagaccagggcaggaggaaatgcggccagctttctggaaggaatcgatgacggcacttatgtgatggtggatggatacagcggctataacaagctaacgaagatacgccggtgctgctgttatgcacatattcgtagatatctgatcgaggccattccaaacggtcatgataaggactacagccatccggcggtccagggagtcctgtattgtaacaagctgttcgaatacgagagggactataaagcaaaaggactgtcctatccccagatatacaagcgtcgcctgaaagatgaaaaaccggtagtggaaggctttatgcgctggctggatgcacagaggccggaaaagggaagccgtatggatcgtgcagtgacttatatccgaaatcgaaaagacacgttgatgacgtatctcgaagacggacggtgcagcctgagcaacaatccgtcggaaaactcgatcagaccggtgaccctgggccgaaaaaactggttgttcagcgacagtcaggcgggagcccatgcgagcatgatagtttatactatggtagaaatggcgaaagctcacggacttcatccatacagttacctaaaatacctgctggacagtcgcccaagtaccgatacaagcgatgccgaacttgcgaatcttgcaccatggagcgaaaaagcgaggatagcatgtagcaacaaatcagagtaaaatgctaacaaccctgacatcagtgactggtgtcggggtaaatatattgggaacaccctgatacttggcgcttaccattaaaaagctagagatacattatacaccaaagcacaggagttggctggatattgcggaaatagagcttaatgtaatgacccgccagtgcctcagccgacgcattgctgaaataaaattgttacgtagctaactgtctgtatgggaaacggaacggattactctggcagcaaaagtcaactggcattttagaaccagtgatgcccgagtaaatctaacttcattgtatcccacatttactaacgcctcttaattaggtagtagcattgctaaacatcataaagtcagtacaccagattcttaaagcaggccttcaaaccaatccctcacgaaaaacctgcaaaaactttgaaacattttcccatgctcccagaaacgagagttaattatcgaagaaattcactctaaaaacacctgcaattcttctggggtgccgagaacgtgaactttagctttatctacaatactaattgtaacatccatcccctttccaatcataaaattgtaaagaggcgcaatatacttttcatttttttccatcttgctgtcacctacatagtattcctcatagagatttttgtacaatcttgcagaagaaaaataatatgcaccaagagtacagttgttactaattctgattttttctcgaacttctattgcttttccatttttgtcaagcttaacaaagctccaatgatctcctactgcatgaaaacaaggaatatgaccatcaccataaatgtcttcatatctcatttcattaggctcaacatatgtgtctatattataaatcaggatggcactatctggagcacaatacggaatggcgagaaaacaagttgttgcttgaccgtcagtaagatagtcaataccgaccacctcaatatcagtaatgccatacttagccatcttatttttaataaagtcctccgcttcgtcttcatttcttacaacgaacacatacttcgaaacatgattaatatagccaatcaaactatccatcgaccactcaaaaagagtcttaccctttgcctcaatcatatatttagggcagttataaccggcttttctaaaacgagaaccgagccccgccatcgtaataataattgtcatttcttttatcactttaattcctccttgatcttcatacataaggcattcaactcatcaactgtacagttcagaaattcattcggccttacagttctatcatcaacgtaaaatcccttctgtcccggccaaggcttgccatacaaaatttcatcatatggaatgtcccatttttcgagccacgctgttaatatcttagccgtatttttattaattaagccgagattaccattataagaattcatattccgtgctgtaaaaagtataatctttgcaccgttttcatggtagtacctaagcttgtccaccatactttgatagggaactaattcttcatatttttcttctttctttttaattggacaaagcgtcccatcaatatcaaaaataaatgaatactcttcgtacatcatacctccatctttatgtttacaactctatttaagatttctactccagttcccaacattacaagttgatgattaaagctttctttatgaagcggaatcatgcttaaaaatagcaacgcttcaatgagttcaattttctttagattattgccaacttccttttgaaaaacagttaataatacatcatatagttcataggtttttactcttgttgaaatctgaaaattgatttttctatgctctaaatcataatctatagtaaataaatccttaataatataatcatactttccatctacactatgaaatagctttgctaattcatacctaaaatcaccataaaggtcatacgaaccaaactttcctcttggatcaattaattttataaaagaaaaattattatcaaccatgatatttgtaaagcaaagatctccatgtataatattaaattcatcaatatcataaagcattttaggaataatagtttgtaaaatattatctatttcatccaaagatttatatgttacgccattcactattatatttttattaaaaaaattttcaaagtgactgtcaacctttaaaagatttagtctctgaacagtctttgtcagataaatatcttcaagtgcagactttattcctccatctttaactctgtatcttctgaaatcgttacagacaaaattaattctacaaaaaatatctatccaccgatgtttactaagatcaccatatagaaaaagttcatgcagtgtatgataagcatagtactccattgacacatacggtttgatataggatgtagaatatgaataaattctaggccggacatattctatatcctgtggcaattttaaataccattttatttcatctataaatttatccttgtcatcactatattttgttagaattcctctatttctatcaatttcaatgtgattaaattcacgagccttaacctcaagccttgagttaaaatatgtatctgcgtgtccaatatcaaaccaattagtagtgcaaacatcagtgaacggatgttcttgactatataatacaagtgcattataaaatgcgctcatagacgtttcaggatattcaattgctttctttaaacattttgcaaatgcagatgtatcaaaaatctgaaacacaccaacaaatagctttttcttgtcttcactatttgactccactttatcatagatattagttaacttaccattctcaatatcataataagtccatgtgcccgacaaatagtccattgaataaaaaaatgtatcgccttgccgattataaatattatcaaagacaatggtatcggaaaaatttataataattggctggtctacatcttttattccgtaatagatagtatccgccagtgaaccgagcgtatccagagtcttaatttcaattcttttatcattataagcgtgcaatctcctttgaaccttttctacttttttgcaacaaacaacttttataccttcgcagatatctttatattggaaataaagatagtcaaatacaatcttttgattaaccggatatattatggcaggcaactgacctatcccttgtaattcttctggtatcagtgtagctgacggtattattaatcgcatcgtttttcctccctcgcaagtataagcaaaaattcttttactacacacttttcatgatgttctaaaaagcaatataacttatttatgtcgtacacagtaattcacaaatacccttgattttccaggccgtcattgctagcgccccagtgagtttctattttacccgatatgtttccggcagctgttcagacaatggaagtagagcttctataaattcccgatctatatcattctgatgctcctttaatttatcaaaaaggaattccagataccgaaatggatataaccggttggcttttgctgtttcgatgatgctgtatatgatcgcacgggactttgctccttctatagtgtcaatcaacttccaggtctgtttgtgaacacagaagcttcttaattctccttccgttgcattgttgttcagaggaacctcgctggatttcggaaacatacgcagcgccttctcatgcttcaaactatagttcacacttttactggtatttattgtaccatgtcctacggacatgtcatgccccggccgggatggccgcttcgctccgggccggtatagctgtagtaggaaatggcttttaaatttctgctttttgcacagagttccgatagaaatgtctccgtgattggatttttttgcaacaatctcaagcccctgcatcaacatggtgtattgttccggatcgatagccagtgcttctgatgctgttctgggccagctgaagctaccgacatttaaacgctaataaaggaacagaaaaccgactccttcccaaacgagacattttatgcggtctgtccttctacccagaacagaaaaaggatgtctttgttttctgttctgccattagtctgagttcaactaaagtttcattcctaaggatctgctgccagtaataaaaggataattcggaaatgccattgtcccggcaccagcttttcttcgattgaccacttgcaaggcatcaccggataattttagtccattgttcacagcggctctgatgtgttgttttgtccataagataatcctccacaaaaactaagattttacagagtgattattccatagatgaaagaatctagcacggcactagttatttactgaatactccatgtcggcgaaacgtgctaggaataatatttttcaaaatatccttatgaaatttaaataaatagatgtatgacaatgtcaaatagataattgcaccagcaccaattcttataattatagttagtagattactataaacataaatttggcgtattgcaaaatacataatgacaccaaaaagaacaaaccaaatgcaatctttaatataattcaaaatcggcagtgatttacctaccattattgtctgcaaaaagcacactaaaaactctgcacaaactgtaccaattgcaactccaatcgcccccctactaggaatcaaaagataatttatcaataaattgcataaagaagcaaccgctaccgatactaaatacctaacatccttcatgtttggtattaaatattgcgttcttattacatctccccaacatataaatatcataatgggtgctagtaaatacaaaagaggaattacttgcaaaaaatcctctccaaaaaaaacaggcacaaatacatctgacacaccgactataccaaatgccattgcagaacaagcaaatatagagatcatcattgatcttgaggttattaaactagcttctttgttattgtcattttttgccagattagacattcttggaagcataacggttcctaatgcagttacaaaactattaggaatctgaattaaccgttccgcattttcatagtaaccaagttctgtcatcaccgtcatctttcctagcattatcttatccatatatttaaataaattagttgcaataacaggaataaacaaaataatattcggtttaaaatgtcttaaaatctcaattaatttaggacgtctataatcaacaaagcttctcaagaatggccacataatcagttgagaaagcaatgcacctccagccataattactgtatatttccataaatcactttcattatgtacaaataaaactataagtacaacactcagtaatttgatcgtagagctacgtattgtggttattttaaactgttcaaaaccaaaaaagagccacgaaatgtcaaaaatagatgataaaactaacataccctgtataatagctattgtaaggtttccttcacacagtataacaacataaaagccatacgccaaaagcataactatcgatgacaatagctgaaaaaagtaaatactccaaaaggtctgacttaattcttccctattccctcttactcgtgcaatacttctatttccatagtttttaactcctaacattccaaatagcaaaaaatagtatgctacagaatatgtataactgtatataccaagctggcccgcaccaaggcttctagaaacaataggcgatgtgatcagcggagtacatgcagataatacttgataaattatattgtaaagtaaattcatcttaatgctattgttaattaatgtttctgttttcttcacaatatatgcctttctaacccctcatacctgcgcacctggcaccaccataaatgaaactgtgccggcggtagggtattgaatttgttattgccattatcttatactgtgagtaacggcaaagatcgttttaattttggacctgcagcccgttttctagactgatttcaggtactctcatttgcaccaccatctgttcagccgcttttggcaaaaggacatacagtaaaatgacaatagacagagtaccgtgccgtaaatccatccacagaggtgccattatggataaaatttacgacaaatgtgtggtattgatgtgcacaaaaaacttatcgtcgcctgcttcaggaaaggcaacaggcaggaagtacgtgagtttggcgaaacaaccagagagcttcttgatctggcagattagctccgagcaggcggttgtgagttaactgctatggaaagtacagcctcctattggaagcctctgtataatttcctcgaatctactgacctgaacgccatagtagtaaaagcccgccatatgaaagctgttccggggctaaagacgaatgtacaagatgcggaatgaatcgcagatcttcttcaacacgggctgctcaagcccagctttattccggacaaggagcaacgcgaactgagataattagtccgctaccgcaaaagccttgttggtgaacgctcccggaactgaaccgtcttcaaaaaatactggaaggcgcaaacataaaactgtcaggaaccgtgtaagacatccatggcaaaagttaaaagcaattggcagggaagctcctgtaatttccatataagtctgtcattaaattcaaaattgatgttacaaagcatgataggggaagtctgcgcttttttggcttcccagaaggttttgtttcacagtaattatatattgagtcaaccagacatctgctgttgcaattgaactaaatattgaataaaatccctaacagttcctctgcctccattatatatacttatataatccgccaagcgtttaacctgttctactgcatcattttggcacccaacaattaattccaccttccactttaattagccccatgcacagtagctccagtatatcatcacctatataagcaacattttgaaatgtgaattttctattagtatctgaactttgggctagaaattcagataaacattgcaccctattacgcacatcttgaaatagctgttcaatccgcaattcttgacatcgtaattccagcatattgctctttctagcagtaataataactgggataatatcatgcttgggttaaatatctttaattccccaaccgtccttaatgctaaatgctttaaaaacttctccagtctcccccatgtaaatcattccatcagttaatgctccatctacatccataactaaaaagtttgatattcatagtgtcttcaccttctaaatctacttttcaaaacgagatgatgtaataaatctgatgggagaattttgattttttctatttgccatgtaatctacaaacatatccataatttctttattcagcgtcacaggatttacatatgccgatgacagttctaagaacttagatgcataattcaactgtctctcactgctataactatacccatcaaaaccagctatagctatttcagaaattccaatatcatctaataaacgcaacaacattattgtggaattatccatatgctcccatccgcatttgatgtacttattgaaagaaacaatgtgcatggttggatcattagaatccaacaaaatattggaagtaacaattttctgagctgccctgaaatcaatattatttcgccaatatctatatcgtttgacattgctcatataaatatagtctgccttaactttatcgtgcataaattggacagaaataattaccggatttttttcatcaatataggcagtaattttatcactttccaatacacatgaagcaccaggagcgataatcagcactggattacttccaatttgctttttcaattctaatatgacattactatcatccacgttagattcaatcaattcaagatatgttttttccagtaaatcatagtcatatctttttcttggtattgcaccaattttatttagaatatatcggatatctgtggaacgaatgctatttttattagttaaataaacaatattattaacatgggcactatagcagccagctataaaaagaggtgtagaatatccccattcacatcttgatctgatattatccatgtacccatcaattatatctagaattgcatctataccataggtataaccaagctgagataccatatattgtgctactaattcagtaggtgtattcccagctcccctccccataccatttatcgtaccatcgaccacaacttcgcgtttaccaaccgtcattcttataaattcctgagacaatgcgttagacaattgcatattattatgagaatgaaaccctattttacagtttgaggcaagattatgatttattaattcaaatactctatacaagtcttcttgatacattgaaccaaaagtatcaacaatagatagacaataaggttcaatttcatttaccatatttagaaattcgattaattctaaatctgaatatcccagtatatcaaccggctgaataaacagtttatatcccttttctttaattgcacggcatgctttcattgcgtcgtatctctcagctttgaaaaagcattctctaatcgcatctatggaatttcctgtacattcatcaagattttccacagaatatctactataatcggcaagtacagtaaattcacatccttgcttatcatcaggaataaatctttttgcatcagcagagttaatgaaaactgtttttccctcgccaaaaccatcattttgaaagaatccgatttcaatataatcaatcttggctttaactaatccggcaacaatacctttgattgttgtatctccaaaagttttgtcaatcaaatatgcaccatctcttaacgtacaatccaaaagcctagcgtgctgcattaaacctcctcctttactcgagtagccattatttctcggattttctccaaatcacgtggtgtatcaacagaaagtgaattgctctgtactaaatcataatgaattcttattccatgttccaaaaaacgaatagacccaatatcttcaattttttctatttctgtttgctcatgtgtaacataaaattcaagagccggcttattaaatagttcaacacctacatattttttataggtgaattttgcagtcttctgaggatacggtaccggacttctagaagtatataaagaataaccattgaatccgactacgattttaatgttacccggatcaataacttctactggatccttaaactctctaaccaatccacgtacaacaggatgctcattctcaacaaagtcaggaataatttggggtattacttccggctcaagaatcggctcatctccgtttaccgtcacataataatccgaatctataatttgtgaaacctggtaaactctatcaattaaacaagagcaatcacttgtagtcataatagcttgtgccccgaagcgctcacattctttttttattctctcatcatctgtagcaacataaatttcatcaaactccttaactttaagcacattctgatacacccaccaaatcatcggatgaccacaaatatccatcaatggttttcctgacatacgtgttgaaccatagcgggaaggaataataccaacgattttcatttttataatctcctttactccaaaatcctaatttttttcgctggtactccagcatataaacaatttgcttctaaatcatgtgtaactacagttccagcagccacaacacaacctgagcctatagtaactccagataaaatacttacccccatacctatccatgtaccatcaccaatactaattgctcctgtttttcttccagtcgctctttgtttagtcgtaccaatctcatgtgtaaagctacacagatggcaacacggccctaaaaaaacatttttcccgatatttatgctttcacttgcatcgtgtcctgatataaaatatccccccctatttatatgagacccctcaccaatatctacacaatcaccaaaatagtttcctggatcaattataacatttttccatttgtatcccgccatctcatatactttcatacgccaccatttgttttgtatcttccccgccataacactcaatctttgcctaagtgacatcacataaccctctttctaagtttatattcctcatacttggaatcatacttaatctcacctgaaaccaaacttaaccaattttcaaaagtccaattataagtcaaaagttgatcctcagaatctccaaattcaaactcatgtgaccaggtattctcaaaaatgttcaaagaatattttcgccaaaacagatcaatttgagatactgaaatacatatgagacttttttttacaaaatcccaatattgctttactgatccatctatagaaaaaccaatttgtttagcataggattccataataaaattttgtggagcgcagtagtgcaaagcttgtccaataggatatttctctgccaattccatatcaaatttgtccatctcttttctgtccgaaaactgcttgtcactgagttttctggaaaagagttttagcatatcatctatcattccaaaatagaaaaaatcagctatatagtatggtataaacatgcatccggtcgaaccttgaagaaccacaattctaccttgttggtcttcgcattcactcggaaaagtccttatcaatcccaataaaaatgagcatgtactagccttataaatccgttgatcggtccttgttttcattgcaaacgcacatccaagctctttagccttttttaatccactcaaagtggataaaacctgcaagtttacattaccgataccggtatatggtggttgttcgttcaaaacaactacacaatcaagtttttttatcgacgaaatgtactcattagaaacgtttttccacgtagataaaatcaggacgctttcagggaataatttcctatacattttaatcgtttcgaaggtaaagttatctttatagtctggtggtccttgcaatataattgctattttttttttagtgtctacctgaaaatttaacaaagttaactgaattgcttctatcggtctacattttaaggtggtaaagcaatgtgaaattttctgatattgactacagattacagatgcaatctcattattaaactttgggttgatttttcttcctaccttaaatggaagtatgtaataataatccattactgttttaaagatatcttttgctttgctcattatttgtattcctcaatattaaataaactatcaaaatccactctttcaaaaacctcaagtttaccgcctcttgttgcgttataaatcttaattccatttttttttgcatattcagcaacaacctcataagatattgtcatctgcttttctggactgcatatatgtcccttaaatctgaaactactatttgaataatcgcagtcaacccccaaaagatatatctccttaaaccccatatacatagctaattgaagcacagtataagttactgtaaagccatcttctatctgcaaaaaacagtctgcagatatcttcggacgaattggagtttcataatctttttcggttcgacagttatgattatgcaaatcttgagcaaaataaactacattcttcagttccttacaatcgggagaatatctcttcacaatatcagcgataaaatatacaatcgagacattatcatatttttttatttgttctttattcttcctataaacatcgcaatcttgtaatacataaaagtttggacgccactccgttttatcaaagaatcttactaatgaattcattccaaatgtatattctttgtggtctttcagtttatataaatcacttaatgtaagactcggtccggttgctacaacaaaacactttttccctttatattggctttgaaatttttttatttcatcaaattgagatttatgtcccctttttcttttaaatctgtctagcatgaaccgtattctatatatgccatattctccatacaccatatgaagcattagtctatgagcactatatgtaataacgtacaccgcagatcttttgtcaattaatttgtctctaatgctttctttcaacctataataattcacggctatctgctcctttcctgttatgttccaagcattgaacataagccagcattattgcaatgctatatagcaaatgttgatacccaaaaagtccatttacaatcattggagaaaaaatatacaatacaaggcccacacctattgcaacaataaatgccctagaaaatcctttgcatctcagttttctaagcgaaaaagaaattgccttaataaaaatacccacgtataggctgcatccaataaaacctattccaagtaacatatgcaaaacgtcattatgccctgtgtgaccacttacgcttagtatataagtaaatccatgcccgaataatttttctatgatgttactgttgttgaaagcaacaatatctctcatccaaaacactgtgcgtcctgatgtaaacctatcgatcgtactaaaatcacttggcgcatatccctcttgtgtaaataagaatttattcattatatttgaattaagaagaatatagccaccaataataattgccaacggaattagcacatattttatctgcttatctttaaggcgaaaataataatacaaaaagagaatacctgctgcacaaataagataaattcttgcgccactttgtaaaattgcaattatcggtgaaagcaaaaaaaatatttccctcgtttcaaacttccttccctgaaaagagaataaatacatagccatgcaaagacacatacaacttgctgtaacatgcaagctaggtgcaaacccaagaaaatatctattgttttcccccaacttgcttctacagcataacacgatggcattattagcatgaccgttgtaatcaaggaaactatttgagaagttcttctaataagcttcgtgttattaatcaaggcctctattatatttttactaattttcgaatcactcatacaataaattagcaaaaaaaccgtcgatatcctaacaaaatccgaaaagttttcagtcaagttatcggtcacaaaacttgtatataaaagcatgaaaacaagataaaatagcagtagtacccgtcttgttgttgtcttttgtataagcttcacgaataatataagaactataaaaagtccgatcacaagtgttgcagaaaatggtattaaattataaaaaaatacactgaacatatacaggacaaaacattttatcagcgtgtctgtcaattctattctcactctgctttattctccccattattttctcatttgtgccacaatgtctgcatccacaatctcttctccagttctacccttaagttgttcttttgatgctccgctcaatccatcattgactacggctctcagatcacaagtactgcacttatctaattgcgcttttgtagcttttccatttctatagtcacgacaaatctgattctcatacatggaatatggatgcttgctaaacaacgctttcactttatgggaaatcacccaccaaaccggcacccaaatatacttatgcatagcaggactcacactgccaatcatccaacagttccggtcgcagcagcgaaccttcttacgtaccatcttcgcctctggactgttccacagttcgtcccagttctgacggttcagattacccatgacctctttatccttagtaccattacaaggcataacatcaccgtacggatcaatgaaaaaggtatcaaagctcatgtcgcaaggcaacaatcgcttctggccgtagatgtagttaatcagaccatggttaaaataagccctgaaccacttcttcggactattgctcctaagtagctgattaaccagatcttcaaagttcttcgcaaccatcgggcgatcatgaatgatgttcttcgcttctacaaagtagaaactgttatgtaagctggctgttgcaaactccatgcccatctcatctgaaattttataaagcggcacaagatcaggagcattcttgtcctgtaccgtcataccaaaaccgacgtccttcattcccatctcgcgcagcttttttaaagtgccgtagccacgctgatagccattctgcaaacctcggatttcattattggtcttctccaaaccctcgatagagatacgaatgccgatctgggggaattccttgcagagatccacgattcgatccgtaaagaaaccatttgtggagattacaatacgatcagacttcttatacagttcccgcacaatatcttttaagtcagtacggataaacggctcaccaccggtgatattcgtaaaatacatcttcggcagcttcttgagcgtctctatattaatctcttcttccggtttggaaggagctttatatcggttgcacatagagcaacgagcgttgcagcggtaagtgacgatgaccgtaccattcagttttttctcgttattatttttctttgccatcgttttatctccctttatagcagtagctttcatattacttgtgctctttgcagtatttacattcttttctgtatcagctccctgaacagcccccacagttttcgcagccccagctggtttcttctttcctctataaatctgcatcagcttttcggtatattcttcaatatcatcaaattgaatatccttgcagttccggctgtaggtatctgccagtttcttatcagcccacagcttctggattttctctttcaattcactcgcactgccgctctcgaataactcgccggtctttccaacctcaattagttccggaattccgccaatgtttgcgcccagaaccggcgtgccatacatctgactctccatcacagagaacgggcagttctcataccactcagacggatagatagaaaaccctgcttcccggattagcttctccaatgctgctccagtctgaaatcctacatttttgatattcggaatcccattaatttctttttccaatgggcctgaaccggcaaagataaactgtacatccggcagttcccggcatactctgatcagtgtgttgatacctttctcttttgaaaatctgccaaaatacagaacatactccttcttctgaacatctttccactccaccctgtccacgaaattatggagcgcaactgtctttttggcaaacaccggattgctgttcatttttgttttcaaaaatttggaacaacagattatagaatcaatgtacttataaacgccattcagcttccaaaattcagcttccattgttccgattgcactcttcgctgtactttcatggatacattttcccttggtgcagttcaggaaatgccctccaaggcatttctcacagttttcaccggtattcgggttattgcacatatggtttggacataccagctggtagtcatgtgccgtgaaaataatccgacatttgttgccctctctgcgccatttctgaacttcaaggatgatgctgggtgtcaactggtaattaaaattgttgagatgcaaaatctgcggcttgaaatcctccagcaccaaacgcagcttcttccgcgcttccgaagaataaatcgtcttaatcggataagtcagtttggacagcttgcttccaccgtgaaaatccatatccgatgtataagcgttcaccacattccctacgcagcgcccctcatgctccatcccgaaatactgaacttcgagcccctggctttttaagtaatctcccaatttaaatatgtaggtctctgatccgccgttgggatagagaaacttgttgatcattaatatcctcatagcatacctcttttatttcatcttgataaacttccccggatagaggaaaactccagccatttacttttcttcataataatcaccactatcattgacccaacaaaactaatagcaattcctagaatcatgtgaagtgtcgcattctgaattttcaacttaaacagcacggttcttagtggagttgcgaacagtgtatgcatgagaaaattagcattatatatttagcaaaagtgcagacattactgtctaccttctattctcataaatttttctcttaatgtaacaacagaacagcaagccagtaatcccagcagaaacctgatgactctatgagcgtttccaatcacgtgaacccatataatcagtaagagaaatactgccccctgtagcaatcggtataatcaggcctttcttcagcagatacttcttaaattcaaatacactcagacacattccaataacgaaccagatttcgtttgaaaggatgtatgaaataacttgcactccatcctcccccgaagattcccggggctttgaaggctgacgcaatgatgcaaccgattactgccatggttctagttctgaatgtcgtgtaaaaaaataacgtatctcccaattcaccaatttgactattaaccaaagaagaaaacaacgttttcagaacatctcttccccaactgtagatgtcattaaccacactcaatttctgataaaggtaaacagaacaaataaagaatagcggcacatggaaataataaattgtctgattaaaccactgatatagttcattcgcagacagtacattcatctgtgtcatgctctggaagaaatgtcctaaaaccaccaacatgtaggcaaccactttaacattttcaccccagatttctctatgctttgctttttccattgtttttcatcctcgtttcttaatattaataattaaccactcattctgtgcatcaaattttcttaatttatatccctatcactacctcaacctagtaatcaatattgtttagatggcagacatccagccaaatgtcatctggcatcagacatagttcctttttcgtttttgtacagtaaatcgtcttgaactggtaggtcaactttgataatttgctgcgtccatagaagtccatatcactggtatacgcattgtcttctgttttcgcaataatctttttcataacaactgcaaacaccgtcacaccgcagaaaactgtaactacggtaatcacatattgaagccagccattgccaaaccatctattgatgccaatcttttcaacaacacgaaaaatcaccatgtgggacaggtatatctccatgctgacgccgccgaagaactttgtaactctattttccagctctccacccctccgcttgataattgcatatatcagaagggaactagagactagcaaacacatcatcgcattttcaccaatcaagtagcaaaaatcaaccgtatatccaacaataccaagcgcaatccactggtttaactttgcgatttcctatcgatacaagtaaatcagtctgcctgccaagaaaaaacaggcactatacaggatattggttcttccagtatcgaaatgatttgcacagacaaaattgtaaataagaccgaccgcaaatgccatccatgctcttctcttgttctcttgtagaacacagaagaaggagaagataaggtagaaaacaaatatcaactctagaaaccagccaacaccaattacagagatgttgcctgctcctgatagcactccaaataatagtgtcaaatctgcaaaccctacataaagggatgtcacagacggagacatgataatatctaataaaacaagtgctccactctgtcagattcacttaatttttcagtatcctgtcataataaccacaccacattccaaatgctgatactgccataaataggaacacgaagtttgtaaaagacagaataatcgtgttgtatacgactccagttatttcataattattgtctgcgcgaatatgcatcattacaattccaaaggccgcaatcatccgtaatccatctatcgctccgtaatatctcttctctatagtaatctccactcttacacatgatacagcttcaatgtctgctccaccacatcatcccagttgtatttctggcaaataaaatctgctgccccactcttcaatttcttgacagcatctggattgtcacaggcatattgtagcctctctttcaaatcggccacatccgcctttttgaaaatgagagccttatcctctatgacttctgtacactccgcaatatcagaagtaaggcagcagttaccgtaactcatggcttccaagaggctcagaggcatgccctcaagatcagagggtaaggcgtacacatatgcattgctatagagttcttccagaagctggccctgcacaaaccctgtaaaaacaatccgttcaccgccctgcgcaagtttcttcagttcctgtgaaaaagcagccgtatcagaactgcctccggcgattaccagttttttctctgtctttacgtttttaaatgctttaattagatatgcaattcccttctcaggaaccaaccgccccaagaaaaggatatattcatctttatcaagtccatatttttctttaatcagttgtggacttctgagaatgggtctgttaactccatttgtgataaatactgtctttctctcgtaagtgtccgaaaaatacttctggacacattccgataagacgataatctcatcagcgaatttagctgcaaccttctctccaaacttaatatacttgctggcaaatcccccccacttagcgcgttgccagtcgataccatgtattgttgcgatgcaccgtttgccgaacaattttggaagccaaagcatggcacaaggaccttccgcatggaaatgaatcacgtcgaatctcccaaaagtagcacagattgctccaaaaaaagaggatgtcattgcagcaaaaccctttcgattgatagtgaagagagatttcagctttactcctttatattccttaagaaagtctccgccaaattctttcccacttacatgatgacctgaacgattgtagcaggtaacagaatgacctgctttaaccattcttgtggagagttcctccacgacaatctctatgccaccttcccgtgatggaatgcgcttatgcccaagcattgcaatatttagtttattttccatcctccacgtacccatcttccttcatcccatatttcttctgtgtttaatctgttttttatcaacgaaacaggtctattcgaaatgtaactactcaattcaggccaagatatgttcgttcctagttcaaaactctcatccaatcccgaaaaactatcgactgattttcacaggataataccctcggtctgtctattatttataaaacagtaattcagttccacagaaacctcttatctgctaatgcctattttttacaccccaaagcatatccctcatccccccagaaccacccgccccagaggaacaagggacactctctccaaataaaaccatctactccaaagtcatcaaatcttacttcttataaacaatcgtaaatggagttgttccgctcaggttcacggaaacttctttcgtagcataattaatgctgctaggcgccatcagctcccatgcctttgttgtctggttgtaatacagaatctgaacatcgttcagtccttctaccaggttcggcacgtagaggttcaggcttacgccgtctccggccagtgctgtctgaaccggtgctaacggaacgtatccaaccatgttgtttgttccgattgtacggtacagagcctcggttcctgcgttgattgtattgatcttatcaatcaaatcccaggataatcctgcctcacgaagagcattgttgtctgtggcaaatgacacagaaccacttgcggctgcgcctccattgttgacaaccggcgctgcactctgctccagctttccagtcttcagagactcgctgcggctgctgctgttgtcatgagacggtctggaactaacacttccggctgcataagcagtcagaggctgtgccatcagtgctgctgcaatcagcaggcctacatatctctttttcatgtccttcactactcctttctaaataatatttatcaataaatagcggtctttcggctgctaattattgtcgtcttagtctgccaaaagcactgcttcccgatataaagcagctactttacttccttgtaaaacagctcaaccaccattctcttcagagcttctttatcgggatgatattcgtcaaaacgttctgtctcaacggcctcaccgggcacagtcaggaagtctccctgccctatttgctgctggctgttcaaaactgccagccccatatccatatattggtctttggccatgttggtgaccatatgttcctcgatatccttaacaagacgggtaatcaatgttttatctgttctggcttcctcttttacctgtttcaagtatgcttccatatactgtttctggcgatccatacggccgatggctgtctgagctttagtaatatcccggtaacggacaaatatctccgcctgctttccattgagacggaccgttctgccttttgtcagagccggatctctgctgtccagcccctcgtcctgaatcgtaaccgtcacgccccccacttcatcattcagaagtgcaatggagctgatgtttgcagccagataaccatctatcttcaggtcaaacagcagattggaaaccgcctcctgcaaaagctcacagcttttttcttttccatcaccgtaagcaaaagccagcgtcagatgctgtgtatcctttcccagttcgttccccatcaagtcaaacagtgtaatctccgtcatcgtatccctgggtatcatcagaatccggaccgtatccctggccatatcctgggctacaagaaacagtccgtccgcctgcccggccacaccggatgcctggtaggattccagttccccctgggtatccacgccaatacagaggattgcacggaccgccgtattcctgcggtataatttcccgtccagttctataagcccatcctgcgttttgcccgacgccaaattcaggtcctgcccttccgaaagacctgcctccgcctgcttcttatcggtgtagaggccgtagctaaatcttacaaaccagattacggcaaccaggaggcataaagcagcaacagccagaaacagtttgttatgtatcagcttatcttgatttctgttttttcctgtcccgtcagccatcgttactctcctgtgttcatcttaataattgcttcttattaattacttttcaatttattgcttcttaaattaattgctttttggccttcgcttttaagttgccccccgctggaacaggacgacaaataccgtttcaatcaagagcttgatatccaaccagatagaccagttatcgatatactcaagatccagcttcaccacttcctcaaagtcggtaatctcactgcggccctttacctgccacaagcccgtcagccccggtttcaagctcagtctccttttatgccgctcctcatactgcataaattcctcctcggtgggaggccttgtcccaacaaggctcatatcgcctttcagtacgttataaaattgaggaaattcatcaatacttgtttttcgaataaattttcccacctttgtaattctgggatcgtccttcattttgaacatgagaccattcatctcgttttgtgccaacagttcttttttccgttcctctgcgtctatatacatggaacggaatttataaatgtaaaatttccgcccgtttctgccgactctgctctgcttgaagacaggcgcccccggcgattccaggcagatcgccgggattacaaagatgctcaggatgccggtcaaaaaaagtccgacaaagcctcccacaatatccattgaccgctttaaaaataactccgtcggttcaaaaatccttggactataggtcaggacatgataaatgccaaaatcctccaccgttttttcccggttcccgcggataaaactgttaaccgttacatgggtattgattccgattgtctccagccgtttaacaaactgcccgatctcctccctgccggaatccggaaggcttagcaaagcctcgtcaatcacctgatgcctcagaaaatcctccagtgattcactgctctcttccatataggaacggttatccctgtgcagaatctggtagattgctacctgcttgtcctcatccttttcctgattatccaccagcatcagggcaactgcttcgtaatcatacatggtagatgtcacaaacttgtgcatgaccttcaacgcattttctttgtttgaacaaattaacagccgtttcctgttctgcggatttcggtaataggtaaataatgaatttttcaaaaaaactcttcccagatacatccaaataacattgaatacaaaaagaacaatgtaaaaggatctcggaaattttgttcccaccctgcatatgtaaagaagaaatgacattaccagcgccatttggaaattgacggtaactactattcgaaattcattccagttgttccttctcatcagacttctcttaggctggtaaaacaaaacgactaaaatatacacgaccaggagcactgtcccgccaaaccagagttccagcgaagatttcccttttaataccggttggcggatgattgccgccagaatataggagacaataatcgccgctatatccagaaccatgtagaacgtccgattttttaaaaccatttcatacccgctcccttataactttacagccgtctttaccatacgttaaacagaagctgtttttacctcttttccctgcttcgcattctcatggccgtaaccataatacttgccgtatttgccatagtaataataactgccctgcttgatatccactttattaagcacggttccaagtatccggcacccgcttttctccagctggttttttactttctgaagcagccggtagctgattgctccgctctcgataactagtatggccccgtcacagtggcgcgaaatcacggctccgtcgatcacactccccattggaggtgaatcaatcaatatgtagtcataacactccctggcccaggcaatcagtttagtgaatagttctccctcaagaagctctgccggatttggagaaaacggacctgaaaatataatattgagattcggaatattcgtccggtaaacaacctcttcttttttacactggccgctcagatactgagacagcccatccacctgatgctccagatgataccgggaaactaataccgactttctgatatccgcgtcaatcaacagtaccttctttcccagctgggccatggaagccgccaactggaatgttgtctcactttttccctcgttaggagcagagctggtaaacataacggcatggatattgcttcctgaaaactggatgttggttctgagtgtcttcatggcttcctcatattgatagtcattgacttcaaatccctttaaaaccagttcacccatgcctctctcatcagggctaatcaaatcttcaattacgatttcatcatgcatcagttctctccccttccttttctgtcagcgccgctcttttgtctggtaccggcccctttctccggcgccttagcgccccggccggtgctgcgggattttttctgttttccctggcccttttttctgtcttcatttccgtctttcttaggaattactgcaagcaccggaagatccagatatttgcttacatcctcctcggatttaaccgtatcattcagaatcactcttacaacaataaaaccgcaaacaagcagcagaccaagaattccgccgattattgtattcttcagaacattggggcttgccttttcagacgcaacctctccgtcctcaatcagtttcggcggtaccatttccataatctcaccaatgtaatcggaggcggtattggcaacctcgtcaacaatggatttggccagatacggattcgggtcctttatcgtcagggtaagaattcgcgtgttgttcggattatcaatcgtcagctttttctcaagttccctgtaagtcatatccagcttcatatggtccacgactccctgaaggacgggtctgctgccgacaagaaccttataatcctgtgtcagctggcttccaatctgcaaatctgccagggaagtcaaggttgtctctttggaaagcacataaagctttgcctccgacttatactggggtgtaatcaggaatttactgtaggctcccgtaattgccgctccgatcagcagtccggcaataataaaccatattttcttcttcatctcaaagagaagctctctgaggtcaatctcgatttcatcatcatcctggtaaactttttccatactcttaaaatcctctttatccttattgtctttttgtgtttttatctgtcagaaacatgtaagattctgttgtctgtctatgttctttccagctttaaattaattattttctataagctatctcctgccagaattgcggaaggattttccatcgtcaatttctccgccagctcctcccctcctctttttttcagccattccagggactttgccagttccggcggccggtaatcgagacggtgcatatccgtacccagcaaatgaattctgccctccagaacctgttttctgcaccagttccgctcggataaacctttcagcctgctcagacacctgtaattcatctgcatatatgctcccgcctgaataagttcatctatggcttcgctcttccttaaacattgatagcgctcgatatgagccagaactggaaagtatccggacagaatcagagaacgtactgccaaaaatatttcgttgtagggcactccaggcataaactcaaccagaacatatcttgtctctcccagagttaatatttcgcctgaagccagtttttccgtaacaccgtcgaaatacaggatctcctgcccctgataaagcttcatatccggtaaagccacagcggctttctcccgaagaagctgcatcttctctctcagcctgtctgcgtccgcccggttatgtccgcgcacataatgcggtgttgcgattactccgcggactccttgttcatatgccagtttcaataattctatcgtttctccgatatacctgcatccatcgtctaccccaggcagtatatgggcatgaacatcgataattcctttatccagtaacatttagcaatctccaactgtggtgtctaagcttgaatacaacataatagtgattatgttgtatttttgcttaattagagttggtatatgccgattgacttttaataatttgaaacttatatatgtatttttatgaaaaccaaatatagaataaagattattaatttttttatatatagatggaaaaatttaccatatagaatggcagttcttcactagaatatcagaaatgtaattttacaattgttttctgtgattcttctaaagattatcggcatcgccaggatttagaaatagacaaaattatacaaaacaggataagtttatataagaaaacattgaattttccaatctttactgctataatagtcgaaggtcaaaattataaattttttattaatttttgttaatattatatttaaccgtacagatcaatttaatgtcggatttatacaacataatcactattatgttgtaccatcataataacaagttcatcttttcaatctgtttcctatgttcaactcccgaagagacaatataaatcctcgtcgtattaatattactgtgtcccagtaaatctgccagtttggcaatatccttttccatctgataaaaggaataggcaaacaggtgtctgaggttatggggaaatacctttttttcatttactccggccaggcggcagatttttttcatttctttccagatgttgctccgatctaacggattcccctgtttggttataaaaatgggtccgcattgtatgtgttctttccttatataatgcattaatttcaccagaagctttcgcggcaaaaggacctgtcggtttttccctttgcagtccacctgtgccacaccgttcttaacagcctgtactgtgatgcttggcagttcactgatacggatccccgtacttccgatagtctggataatcaaaccaatcttttctttcccttcccgtttggctgtccgaatcaattcgaaatactcctgttttgtcagttccttttcttccggacagtatacctgccgctgttttttcagctgcttgactctgaattcctgccaccccgcaaactgcataaatcggttcagagaggcaataatcgaatttacgctgttcaccgcgtaatgctcaaccagatattctttaaagcctatgaccagctcttttgtcacctcttcaccgtcaatatattcgacgaattttctgagatcgcgacggtatttttctatcgtattcttgcttttttcatcctgttccaaatattccccaaataatatttccatttcagcagttatcacataagtcgtcataattgttctcctttagtatgatttttcatctatattatcattaattggagtatattttaatagataacgcagtatttattatggtaattttttccatatattctttttccctaaaacacagcagacctcctgtgaggggatcacagaaggcctgccatgcaatattttattcaaatataacctgtaaccgtttaaaccagctccagtcgctcatctgcttcaattaacggcagcaaagcttctgaaacctcgatatattcgagccggagcgtactctcaatcctgacaatcttaagctgctctttattggctccccgcagcactttcacggcaattttcaccgcttcatcctcgtctctggctatcaccggaatcttgcagtcatctaaatccttgacggcaattccattggcatagattgactcataatccagctggtcaaatactttccttgtcgttatgtcgaatatcccaagtcccacgccgtttccgtgagtctcctccgagagatcgagaagtaccatcttatcaatctttggtaccggcaggataaattctttgagcagaaagcttttgcccaaaatattcggatcgtatccgcagccggaaatatcttttcctattttttcaactatcaggacatctatttccggtatcatcagcgtcggcatatttcccgccgctatcttcacaagctgcttctcgcgctctatcatggtttcagccggaacggcctctatccatgccgtctcatcataagcgttttccagtaccgcaacgccgaatccaatattggccgactgcataatcatggcagccgcttctttcagcacttccccaaaatggtcgaaactctcctcatgaatcgaggtgcatcccacatggtttccaagaccgatcaccagcatcttgcacagtccgctctggatatccgcaacaaaatcagtatggatttttacccggttgaccggaactaccaaatctgcttcgaatgccgctttgtcaaaatataccttcgtgccgctttttaactttccaatctccaccacatccaggcttgtgaccacgggaacacccatagcctcttccgtgatgccgtacccggtcaggatttccctttgtccctcctcggttcctccgccatggctccccatggcggaaacgataaacggctcgccgccgcatcgttttatctcaccgataatgctatgtacaatgaaagccagattcctgattccgcggcttcccacggcaactgccacacgctgcccttttcgtatttttccggaaatttcttcttttgcaaattccgaacggattctcccctccggatcttccactctgggtctgtcaaatttctgtctgacccggtgcatggacggcagacttatctgataatcctcttccagcatcaaaggcattttcctacctcctgtcttacacattttctaatatccatttatttcataagtcccaaaaggccaagtgtcaccggctcacagaatgtggtcaggccaagcgctatcaggagtcctccgatgaaaaacagcatcggttttatcagccgcgtcatcggttcccccgagataccggcagccacaaacagattgataccgtatggaggtgtgacaaagccgatggcaaggttcatcgtaagcataacaccgaaggtaatcggagacattcctatctgagttaccaccggcagcagaatcggcgaaagaattatcgtagccgggatattatcgataagacatccgataaacagcaggaaaacattgattaacagaagcaggacaatcctgttatccgtaacgctcagcatggcggctgcaattttgtgcggaatccgttccattgtcagataggctgcaaaagccattgataatcctaccataaatgtcgtcatgccattgacgctaatacttctgtaaaatgaatcgtatactcccttcaaatcgatttcccggtaaataaacacgctgacaacaaagcagtatacaacggccacaaccgctgactccgtcggcgtaaaaataccggaatagattccgcccagaatgattaccggtgtcaaaagcgcccagaaagctcccttaaaagacacccaaaccttcttaaatgtcggcctttcacctttgcttacattttctccgccggtgcggaatacggacacaataatcaaaaccacacccatcagtatgcccggtacaataccagccatgaacaaatcactgatggactctcccacaacaacggcgtagataacaaagggaatactgggaggaataataacgccgatggttccggccgaagcggccagggccgcgctgaacggccggctgtaaccgcgcttctccatttccggaatcatgaaacctccgatggcggatgttgtcgccatcgcggaaccggagatggcggcaaaaaacatacatgctatcgttgtaacaatacacagccctccctgtatccagcctaagagcgtatcggcaaaatctacaatcctctttgcaattccgccgctgctcatcagatttccggccagcataaaaaacgggattgccatcagaggaaaggagtcacagccggtaatggcgttctgcgtgataagcgccaccggaatattggaaaaacaactaagcgtaataaatgttgcaataccaattgcatatccgacaggcaccgacaatgccatcatcaggataaaagaaccaaataacacagctatattcaagcttccccgcctccttccacaggctctgtggcgccgtttctatactcttttaccgtccgccataattctccgataatacgaagagacactgcaagctggctgacaggaagactaaggtatacaagatacatcggcattctcatagccgctgaaataagaccgcgcgtataaatcgatgccaccagttcaaaaccgtattttacaagaaggagacagaaggccagccagatgacgtcggcggctatgcggagcatagtctttctcctgctttcttccgaaccgcccagagcctcgatcctgacatgggaattatctctttgggcaacacttgttccaagccaaatctgccagataaatatgtatcttgccagttcttccgaccaggacagtgaggaactgaacacatatctcagaataacctggaaaaagacgaggattacggtaaaaatcagactgcaaaccaaaagatgcgcctccagctgattgtagaagtttatgagtttcttcataatgcgcttcctttcacaaataaaacggagacactactgcgctctgtatttctcaaccgcgtctacgatgtcctggccatatgtggtttcccagttctcatacattggagccaccttatccgcaaatgccttgcgctcctctgccgtaagctcggtcagctccattccttcctcctgcagctttttaagatattcgtcgttattatctaattccatggaacgctgttcgtcgatgagctttgtctgtactgcatcgtccagaatctttctggcctgctcatccatgccctcatagaaatttctgttgatgacaataccgcagaaatcataaatatgttccgttgtactgatatatttctgtacttcctggaattttgcttcataaatcagggatgccgggttttcctccccgtctaccgttccctgctgaagcgctgtaaatagttcgctccagctcataggagttgcatttgccccaagggcttcaaacatctttatgtatacctgattgctcatgcagcgcattttcagtcccttcagatcgtcgggagtcttaatcgggcgtttgttgttggtcatattcctgataccgttaaagttatatccaagatttaaaagccccacattgccgtcttccagctttttattcaggattgttccaaggtccccgtccatggcggcaaaggcgtgttccggggtgtcaaagaggtaaggcattcccagcacctggaaaccgtctacgtaagcgctcagcaggtttgccgacggtacgaccatggtcaatgttcccagcgctacggattccagcatggcttcatccccacccagctcgctgttcggatggatttcaaccgtaatcttcccgcccgatttcgattcgacctcctccttaaacgcgaggcagcatttatgaagggaatggctctccgaacagatatggccgaggctgatctggtaagattctcccgtatattccgaacctcctgatgccgggttctgtgatgtatcgctttttggttcggactgggcggccggtgtgcctgaagcgctgcctgaagaaccacatgccgtcagacctgtaaccatactgactgccgttaaaatcgctgctgccgctttaacactacgtttcatattttatcctccttctggaatttcactctgtattattcgtatccgtttgtcagttaagctcagcttttgacggtaatcactccgtttgtcgcatccatatgtacgaaatccccgtccttaatttcactgaagaattccggatccaccttatgcaccatcggaatctccattgctaccgccgccgtcaccagcaccgtgtcggctgtctccacgattaatccggccgggtgcttccccttcatcagcagcttgtaaagaccatccgcctgcaccaccgaacttccttttcccgacggcatgatgagtatctttcccgccacattctttccatttatatcatgattgcgttcaatcagctcccctgtctcaggtactacgagataaaagcagaccgcatctttggaaaccagagcctcggcctcggccgtcccttttgcaatttttgcgcagtgatatgtacgttccattatttaaccacctttcctgaaattgccgcctctaccgcttcttcgagcggacggattaagaatttaattccgcggatttcattgtaataagcacatttcggagaatccgtcactcccaccgacccgtaatacggtttccagcacggaggtacatcgatgcaggtatcggctattatatggccgccggccctctggatgatgctcagatatcccattctgtccgccagctctctcgtaagggaacttgtcagcagccatgtgtctaccttgaatttccttccctcacagactttagcaattattccaacctggcggattgtgatgtgggggcacccgaacatcgcaaaatcaatcgttcccggctcattgcaaagccgctctctcgtatcctgcaaatctttatccataatcacgatttcccgtttaatctttttgcttccgacggccgcctccacggtaggggcctccggtgtgattcccgctatgtgatacatggatacgcatcccgatgtattgagctgagcgccgaaattcatgaagccctccggcgtcggcctttctttaatccctttaaaaacaggaacctcaagtcctttatatttttccggataacaccagccgagaatctggtagtcaaaatccgttttaacatccgcctggacgtcaaccaggatttccgccttgcggttctcgtcgaagagaagcccgtactccggaaccatccctgttatcgccgcacagagggcgctgttcgccccttcccggttggttcttgcgccaatcacggaattgacatatggggtcgcactggattccgagaaagcaatcacctctccataagccggaacattctgctgaagataaggcgtacagtcaaaggtaagctgcgctcccagcttccggtatgcctcattcgtggcaaacacgatattctttccctcatccggaacttcatgtagatgctcattcagatatttgatgcagatgctcggattgattgtcggggaatcttgcacttcgccccttttgaaagcagtttttcggcaaaccacaggtctgcgtcctgtgcgctgagcgccacatgggttctggtcaccgggaccatcctcggtgcatcgaaggtctctccgattgccacctgaatctccatcgccatggctgcgccctccccatacttaccgttcagcacatcctgttcataatttgtgagtttcatttccttcctcctttttcaattggactattccaatttattaaattttcaataatttcacggccgtttttaacactctctttacttatggctcttattttaatattctatatataatttgtcaagctattttcagttttttgtttaaaattctatatttttaactttagtttggactataccaatccagatatgtccagcttattatacatttaatattaaaattggaactgtacctatcggatgatttctcatatttacgcaaaaaaagaggcgcctgtttctccgaaaacagacgtctcttttaatactatattcatcactaaatcaggttctgtccactctatttcctgtggtttcccttacaatatatccttctctttttccgctattttctcacagatgcttgtctggagatgaaggagggaacccgaatcaaaaacatagtcaaaatacaggactcttcctccagccttcttgtatttctgaatcaggctgaccataaacggctcgcccagtgtgctgtattccttcgttgtcagcaggaggtccgcattgcttaagctttcgccaatctcatcccgttccttatccgaaacaaaggttttcacaatattgatattctctaaatcccgaatctgccaaagcagattctccataaaacggttgctgatcgtccaggctaccactcttgtttccggtgatattttagccagtcctatcaaagtttcgctgctcgtgaccgtggtaaccacctccaccttgctgaccagttccgggaatgcctggacaaacgtttcatagtggtgtgtcgtcgtcacaattatatcaaaattatcctccaaaagctgcggttccttcagcactgtttcgagtagaaaatattggatactgctgttctccacattcttatattcgttttttgccagctgaatcgactccggactgcactctacccaggctatcatcagttttacgtctccggccatatggcggaccatctgctttctgaatatgtccaccacttcgcgggtctggaggcccatctgctcggcgcggtcaaaaatattattaatctccttcgtcagaatctcttctttctggctgtttcctatctcagaaatgtatgtcccgctcccgcggacagcataagcatagccctgatgcactaattcctgataggccatctgaaccgtgcctcttgctatatggttttcttttccaagctcccgctccggcggaagcttctctccagccttcagctctccgctccgaatcatcgcatagagctgctccgtaatctgctggtacttcggcagcggcgatttttcatccagataaatttccatattcctcttactctcccatgtcaggatattattatgcaatgtccggcctgccatcgcgatttaactaaccacagcgccggaacttctccgcctgcggcgggtcgctgttgcggcattattccctgcctccgcaggcatcggctcacttagcgagtacgctcctccgcggagcgttttttatttaacaggtgaaatttcctgttaaatatataagaaatgccggaaatcttatccggcggcaaaagaacgattcgcgcacattttaccatcgtaataaagattcccagcgctatttcagctgctcgaagcaatagaatttaaagcacttctgtacccgagccccagcattgataactttataacaccatacttggtataagtataccacattcagttaaaacttgccagcttttattatcgaccggcattgcatttatcacttttatgaaagtcatattaaatattttcattacataaaattagataaatataattaacaggcataccggtatatgaaactacgcagtaaaagcgctcttattatatcaatacttatccccttagcagttggttcactatctgcattattcagcggcaatatgtcatcatactctatgttcgaaaaaccggctttcagcccgccagggtttatttttccaatcgtatggacagtactttacatactgatgggaatttcctcttatctcgtttatacctcaaacagcccctataaaccgaacgctttattgctctatggcatacagttattctttaactttttttggagcattatctttttcggattagacctttatctgtttgcatttatctggctcatcgcattgatctttataataatcagtatgataaaacaattttatattgtcagtcccgcggccgcttatttgcagattccctatctgatatggtgtatatttgccgcatacttaaatttctatatattcttattaaattaagatgtgtgtttgaaaaggcaaaaaaataaaaacattatcttcaagcactgtaaattcagtatctttaaataatgtttttatatgactcggagtaacaggatttgaacctgcgacctctcggcccccagccgagcgcgctaccaagctacgccatactccgtactctgctctattattataccaaatatatctaaaaaatcaatgaaaattttctataattataaaaataaaggaaactcatgaatccgtgcgggttttatggtataatggccgcatagcgggcattatactgcgcataaacggtttctgcgtccactgcaggaatccggcgctgatttccgtcggctccacgttcctgagggattcgggtataatctcctatgaaaacataattccagaaaggcggatacaccatgatcagttttgaccttgacatgactctcctggaccacaacacagggaagattacaccaagtgcgctggaagcgattgatatacttcgaaaaaaacataaaatcgtacttgccacaggccgcgatatggacaactactacagccggcaataccgtgacattataaaacctgatgctgttatccatatgaacggcacgaaaataaccgtcggtgacaacctgatatttgaacatctgtttaaccgtaaattgttggaagaactgctttgcttctgtgaccgcgagggctatggaattgggatgactctgggtgatgacgattattacattcatcctgagattattgaggccagcgacattaacgcctggggaagctgcggaaggcgttttcaggatccatggaagatgcttgatatgaacatccggaccctcgcctttatcggcgatgaatcccaggtacgccgggttgaagcagaatttcccaatttaaaaatgcctttgttcgccggacgccgcggagccgatgtcatggaacacggtatctcaaaagcagagggcctgagccgccttgccgcatatttcggcgagaaggaagacctctccgattccgttgccttcggtgacagtatgaatgatatggaagtgattatcaaagcaggcatcggcgttgccatgggcaatgctgtgaaagagctgaaagaggccgcggattatgtgacttctcccattgcagaggacggcatctaccgcgcctgcctgcatctcggtcttctgaccgactgaaccgaaaggcagttcacgttctacactgcctgccactccgcctgctcttcaggctccacatgagataacaacctcactcgctcggccggggtcatctgatccagcatcccggccagttcgtccggggtcagattgcgctcttcaagaatatctgcaatatgtttcaagtcttcctctctccgctctttcagaagctctttttctctcgccttcaaatctttaatttgtgcttccagagcgtcaatcatctccctgacctcactcagtttctccgtacatgattttttctttcctcttggcatagttatttcgtctcctttctcttaccagtttttcccggatcattaaattatatgcagtgttttgtacaattagaacaattatatggactttgcaaaaattcttctccggataaatgatttataaaaaggaggagccgggtggcccagtggccatccggcttattatgaaaaaaatattactattctgaatgtctgattaatttgtgttttttctactttcgttttacttgattcatttgctttatctttatggtcttagtatatcttttaattgtgacctctgtttgtagaaaatgtgaatatattttgaacacacggtaaatattttgtgaaaggaaaattagcagcgatagcctgcacgctctgcatacaggccaccgccatcaattagttattgcagccgcagcctccatcattaatcggcattgcgccgccgcatccactgttgcagccgcatccgctgttgcagccacagccgttgttggaagctgcattaaatccgtctctgtagccgacagcgtaaccatcgttaaatcctgctctgtaagctctgttgcagccacagccgttgttggagccgcagccactgttggagccgcagccactgttggaaccgcagccacagccgcatccgttattgttacatccgcatccagaattccagcatccacatccacatctacatctattaaataaacaacacatacttaatatctcctttatttgtttttctttatagtatatagtatgtacatggggacaatgtgttaccggaaaacctctatgcgcacctgactggatgtacttttccgtgaaaagaaaaagcaccggaaatttccggtgccggtactacgtctgcccaggcagaacccgtccatattacctcttcttttttccgccgggggtcctgcccggaaccctgaatttaggacttttaaaaacccaccagtgtgcgatcatcgtggcaaaaataaccgccagcatcacaaaatcaccggtcattcctcccagatggaaggagattgaatagctggccaaagtgtcgatggcaaacagccacttttcaacagagtatacctttttgatgtcataatcagccggattaatcgtgtccgatacaaaaatcagaaaatccctgttgcaaaacagatcaattgtctcggcaagaaacaggcaacctatcagaaaaaacaaaatatccatcaggccaatcctttctaaatcatattttgacggtctgtaaacttaaaattactattcacagccccgctgaaaaagcagttccgtgagcagtaaaacttaaacactgtgaggtaaaaatcatgtttaacaatgaaaaaatcaatcaggaaccaaacggcggcttttcatgtgccgctgcctgcaaaaatgcatccgccgcccgtaatctccgttcccggtatatcggcccagtccgccaaatcagtatgttcgccgacctgtactgcagcgggaaccttttgattctggaatcccatgacagagagacacttctccggatcatggacgtattaaaccactcaatcgaaccgctcgattaaaactttttccatgtttcccttgaaaacaggattaacaccgggaaaatctcaagtcttcccgccagcatgtcaaatatcaggacaagctttgccggttctgaaaaaatgccgaaatttttggacggtccgaccagttcaagtccaggcccaatgttattaaatgtggccgccactgccgtaaaattcgttatcaggtcttctccgtcaaacgccaagagaaataccgacagtgaaaacagtaacgtgtatgccaccataaacacattgattgaccgcactacttcatgctccaccacttttccgtccatcttaattttacggataacctgtgggtgcagaaactggatcagctcttttctgacggtctttacaagcaccaccagacgcgacaccttgactccgccgccggtactgccggcacaggcgccgataaacattaacaataccaggatcgtctttgaggcctgcggccaaaggtcaaaatcctgggtggcaaagcctgttgtggttataatggaagcgacctgaaacgaagcgtgatgcagcgcatctcccaggctcctgtacagacctgctgtatttaccgtgataattcctatggagacagctataattatcagataccaccgcaattcctctgtcctgaatgcctgtcccaccctcttcatcagaatcaaaaaataaacattgaaattcacgccgaataatatcataaataccgtcacaacgttctgaatatagggggaataaccggcaatactgttgtttttaattgcaaagccgcccgttcctgccgttccaaatgtaacggtaacagcatcaaatagcggcatcttccccgccagcagaaaaaggatttccacaaccgtcatgaatatataaatcgaatacagcagcttggcagtcagtcttaccttcggtacaagcctgcttacggaaggcccggggctctctgctttcatcaggttcatatgagaaccgccggtgagcggaagaaggctcaggataaagacgagaactcccatacctccaatccagtgcgtaaagctccgccagaaaagaatagacttcggaagcacttcaacatcgctcaggatactggctccggttgtcgtaaaaccggataccgtctcaaacagggcgtccacagggcttgtaatagagccgctgaacaaaaacggcagcgctcccataatactcataaccacccagcacagggaaactgttacaaatccctccgaagtataaaatatctgttttttaggtttcttaatcaccaacgggacgccaatgagcagacataaggccatcgtgataacaaaactccatcctgcctgctccccgtaaatcagggcaacaatacagggaggcaccataaaagcagcctcaaaattcaaaatccaccccataatataaaatatgatggaataattcatctcttcagctccttctactttttcaaaatatcgcggatatcctgcagtcccttttgtgtagtcacgacaattaccgtatcgcccttcaggatactgtcctgtcctctcggtatatggattttcccattccggttaattccgccgatcagcaggttctttttcagcttcagttccatcagtgaaacgccggtcacctccgactcctcctgaatcgaaaattcgagggcctccgccttgccgtccagtatatggtataatgtctcgacattacttccgattgagttctgcattgcccttacatactggagaatgtaatcggccgttatatatttgggataaatcacgctaccaaggtccagtgtcccgatcagctcatcaaatgcaatccggtttacctttgtgacaagcttggctttggaattctcctttgcaaataaggcaagaaatacattctcctcatccatattggtcagtgttacaaaagattccgcgtccgtcagcccctcctccatcagaagccgcctgtccgtaccgtcaccgttgattatcagggtgtcctgaagcagttcgcagagcaattcacagcgtttcttatccttttcaacaatttttactttaatacgcatcgcagaaagctgctgggcaagataataggcaatggttcctccgcccactaccagcgtattcttaacctgattcgtctggattcctatcttgcgaaaaaactccatagaattcctgggagatgcaataatcgataccatatcgccgtcgtgaagcacaaaattaccggcgggaatcgtcacatcgtccccccgttccaccgctccgatcagtacgtcacagcgaagctggctgtccacgtccataaccgtcaaaccgtccatatgaaattccggtttaattttaaattttaaaagctccaccttacccttggcaaacgggtcaatcttaatcgcggaagggaagcgcagaattctggaaatctcggtagctgccgcaagctccggattgataatcatggagattcccagctgttccttgataaatcctatctcattactgtatacagggttccttaccctggcaatcgtgtggcatttgcccgccttcttggcgatcaggcagcaaaacaggtttaattcatcggaacctgtcactgctatcagaatgtcggcagtctgaaccccggcttccaattgggtgctgatgctggcgccgtttccaaccagtttaatagcgtcaatatcttccgaaaaactttgcagcctctccgccgacgtatcaaccatcacaacattgtggtcttccctgaccagttggtctgccagtgtgactccaacttttccacacccgataatgataacttccataaagtcctccgtgcgtacacttaatacaagtctgtacatttttgtctagaatgtctattttcctattataccaccatatcctgttttttcaaatagaaagaatagagaaaacggccatctccccttgatattgcagaaatgaccgtctttctatcatattattaacttttttcactctttacggtatctttataccgtcttaatgccatcttaattctgtctttatatcatcttaattctgtcttaacgccatctttatcttgtcttaacgttttctttagcgttacatcagagaagacagtaccgatgccttggaaacgataccgacaagacttccatcctcctcgagaacggctatcggatattttgcctctgccgctataggcaggatatcactgataacggtatctctcgtcgtggtctcgacatccgtcacatagacttccttcagcgatttttcttcttttctcgccctgatcgctgattcaacatttacaatgccgagaaacttcatgtggcggcccaccacataggccgtggacactccgttgttcttcatctcgcggagcgcatactcgggagaatccgtctcacgcaccacgcagggagtaatcattacattctttgcgcagagaaccttcgtcatatctgcactgttgataaattggcggacatagtcgtctgccggatttgcgctcatctcctcaggcgtgcccacctggatcaggcggccgtcccgcataatcgccacagtatctcccagtttaaacgcctcgttgatatcatgtgtgataaacaccaccgtcttttccagcttcctctgcagggacaaaagttcaaactgcatatcctttctgacgagcgggtctaatgccgagaacggttcatccattaaaagcacctccggatcgttggccaatgccctggcaattccaactctctgtctcatgccgccggacagattgcctattaatgtatgctcgtggcctttcaggccgaccatctctatcatctccatcgctttgcgttcccgttccacccttggaacgcctttaacttccaggccatagaccacgttaccgaggacgtccctgtggctcatcaggccgaagctctggaaaaccatggaaatcttgtcacggcggtattcattcaagtctttcttactgaaagtgtcgatttcgctgtcctcatacatgacctggccgctcgtcggtttgttaagcatattcagcattctgaccaccgtggatttgccggagccggaaaggccgatgatgacaaacacctcgcctctcttaaccttaaagcttacgtcccagagcgcaacggtgacacccgtttctttaaaaacttcatccttggtttttccctctttcatcagctttgcggcttctgctttgttggaggccccgtacagctttgtcagatgattcacctgtaaaatataatcattctctttttccctgtcttttccgtcgataatcactttattttctgccatccgcattgtcctcctttctcttgaaccatccctgagtcagtcgatccatgagaattgccactattacgactgccgtaccggccagaagtcccctgccgatctcaatacggttaacgctgataagcacttccattcccagtccggaggcgccaatcatggaacaggtaactaccatggccatcgccatcataagcgtctggttgacgccggtcaggattgtcggcagggcctgtggtatctgaactttgaaaagacactgccacttcgtggagccaaaggatctggcagcttccaccacttccggatccacctgcctgataccatggctggtcagcctgattacaggcacaatggcataaatagtcgtggcaataacggccggagctttacccagtccgaagaaaagcactgccggaatcagataaacaaacacaggcattgtctgcatcgtatccagaatcggccgcacgatcacattcgccctgtcgctgcctgaaatcataattcccacaggaaggcctataagaagtgaaatcacaacagacgcaagcacaatcgacagcgtttcatacatcaaatcccacagcccgatggctcccacaaggaacagaaggatactgtaaataatgccatttctcactttaccgctcagtttataacctccgaagaaaacaattgcaatcagaagccaccacggtatcaaattgaggattgcattgagaacattgatcagaatattaagcccgtccctgattgccttaaatacggttgactggttcgcaaacgctttcacggaagtatcaaaggcattgacatcaatcggaatcacaaacgggaaatcaaagaaataattcgtcttctcctgtgaaaggccgagcgcgccccttacatcctccgctttgtcttccggcagccactgatcgattaattcactatgctctgtcaaaaaccattttgcggtatcggtataggtaactccctcgttgtcctgcatataggcaagcgcttccgaggtcagcgcactgctggtctcatatttttccaggaattcgcagaactccggctcttcctcatagaactggttgctgacgccgaccgtaacatcgacagacggacaagcggtctctccggctttgtatttctccaaatccacataggggtaatcttccaggagcaccatatcatacttaccggtcagccaggttggttcccaataataaccgacaatcggctcacccttttcaaaggcggaggtaaatgccgccgaaagcgccgcatccgaccccggctggaagtaattatactgactgtcaagtccgttaaacttcacctttttctgcatgatctcattgatttcccagcccgggattgctccgtagatgcgtcccatacccggtttttcatcatccggaaaaacatctgcatacttttttaaatcctgcacggttttgagtcccggagccatcggctcaattccccgctccggatctccctctatcacgtatctcggaacgtaaaatccctggatgttgtcaccaaagttcgttcccagatccttaaagagtccggcatccctgtcctcataataggtcgacaggttgtccgtccactcctccatattcacatcaatttcaccgtttttcaaggcctcatgcataatcgggcttgaacccggcatctccttccaggtataaccaaaagcagattccgctaccaggcctgcaactgcattatggaatttcacactgtcccatcctacatcggcaaacgcaatctctcttgatttggtactgcatccggccagccctgcccctaaggtcaacaccattgccagaacagcaactattgttctttttttcttcatgtaacccctcctgtctgtcaattttttgtaatactatcccgtttctgactctttatcagtataacagctattcaccgaatacgcaatgcttagctagctaacaaaaaattattaacatttccttaagacaatttttaataaattgtcaggattattaaaaatttaaactttcgttaatcgcttgaaattttcaaagaacagcggctgggtattccctgctgataataagatgcagaaaccgtaaacctggcgtccgggatataaaagaaaaaaccttggctatgcaaggtttttcagaagcagataacgggagtcgaacccgcctttccagcttgggaagctagcgttctaccgatgaaccatatctgcaaagtaaaggctcatgtattgactgtatccagtgatttatgctgtgaacaataaccattatatcacaatttcccaaaaagtcaacgaatgagattgacatatattatttaatcgtgtaatatagttaagcaaatttaattaaatcgatataactaaaggagtataatatgacgatcactgataaaatgaacagcttctattatcatatgtccctgtatgagcttcagatgatgaacggaagcgattatttcaacggcctgtcctataacagccttctctatattaatgttattgaacagcttgaggactgcaccgtaagtaaactggcccaagcgctccatataaccaaatccgccgttaccatcaaaatcaatgaactggtcaggcaaaagcttgttctgaaggaacaaagttccatggataagcgggtttactatctgaggctgagcccggaaatagccaatataatggggctctatgatgagatattccagaaagtggagtcagatctcagaacaaaatatacagaggaacagcttgaactgtttggggacatcctgcagacgatttcaggctataattggaggcaattaaaaaatgaataacgaactgaaccgtgaaattaatctgaaatcaatcctggcatttaccctgccctctatttttatgatggtggtaatgtcactgtatactatcgtggacggaatcttcgtatcccgtcttattaacaccaacgcattttccgcagtcaatatcatttatccgctgatgagcattgtcatcggtctgggcactatgttcggaaccggcacaaccgccatcgtatcgagaaaactcggagaaggaagacaaaaagaggcaaaccagatcgttacattcattattctgtttacgattggtctgggcatcgcattttccgtcgtctcctgcctgtttcttggtgatattattcatcttctgggcgccaatgacgccgtttttgactattgccgcgaatatgcgctgccgattattctgtttctgcccttcagccttctgcaggtgcagttccagagcctttttgtcgccaacggaaaaccgggtacagggcttttggtgaccctggtcagcggtcttgccaatgtttttctggactattactttattgcagtctgcaatatgggggtagccggcgccgccgttgcaacagggatcggctactttattgccgcagtcttcggactgtactatttcgcacgccacagggaggctccgctgcactttgtaaaaccacgcgcttccatgcagactcttatgcgcgccatgaccaacggctcgtctgaaatggtcagcaacctgtctaccagtgttacgacctttttatttaacattatcatgatgaggctcatcgggcctgacggagtggctgcaatttcgatccttttatatctcgattttgtgctgatcgccattaaccttggatattccatcggtgtggctccgctattcagttataactacggaagcggtgattgccggaagctgaaaaagctgtttcgcataagcttatatttctgtaccagtgtcggcttagtcatgacggcgggcaccgttctctttgcagactggctggcttccgtattctcaccggccggcagcgccgtacacgcacttgcggctaccggactcagaatatttgccgtcagctacctgttcaaaggcttcagtatttttacatcggctctgttcacggcattcggcaacggaaccctgtcggccatcctgtcctttatgcgaactcttatactgctggtatcggcgatcctgctcttctcctccctctttgggattacgggcgtctggtcggccactccggctgcggaaaccattgcatttctgctggccgctttcctggcatggaaatacggaaaggtttacaggtatctgtaaatcgtttatactggtactgcctgcggcttttccggcggcaaaggaggaccattatgaataaaagcaaaagcagaaaatatcagaaacaaaaaaataataacttaaaaaaatattccaatattaaaaagatagtgattgggctgatagccctgctctgtgtctgcgggctgctgccggaattcatatccggtaggctgctcggaaacagccctgataatgccgattttcaaagcgcttatgttgctgtttccgaagctgtttccgacgtactttcaggtaatattcccaattcaccaaaagctcccgaaagcggccgctttgaggatattccctctgtcacggatccgtctgaacggagcgggctcagagtggattttctcgacgtgggccagggcctgtccgtcctgataaatgcagacggccactttatgctttatgacggcggtgacagaaccgcctcttcctttgtcgtggcgtatctgaaagagaagggggttgcaaagctggattatatggtggcctcccattatgacgcagatcacctgaacggactggtaggcgcgctcaacgtcttcaacacggatatgattctcggccccggctacgaaaccgatacaaagatttataaatcatttaccgatacggtacaaaggatgaaaaaagaggtagtccatccgcagccgggagaacggtatcccttgggcgggggatattttgaaattctctcccctctttccgcccaatacgatgatgtaaataattattcgattgcaatccggcttgtctacggcgatacctctattctcctggcaggcgatgccgaacaggaaagcgaacaggagatgacggagtactggcctgacttgaaagccgatgtattatgtgtcggccaccacggttctcccacctccaccggggaagccttcctcgacagcgttaatccttccatcgccgttataagctgcggcagggataattcttacggtcaccccggcaaagcggtcctggagcgcctggacagccggaacatcacggttttccgtactgatgaatccggtaccatcaccctgacgagcgatggaagcgcgctgaccctgccggcatcctgacctttttcgaaccagctgtatctgagcctgccgtccgccaggatactgtcctaactaaattccttgttaacggtaacaggcgcgctcggcgcgcctgttaccgccggcagttatagcatccggataggatgcttatacctgcctcattttcgggtctaccgcttcttttcgtacattgtgggtctggttctggttttcaggttttactttctgtgtaatactgttaaacttttccaggttctttttctcctgtattttttcctgctgtttctgattcatattatctgtcatctgcttcacctcaatgttagtatgagcggccgtgaaaaaaatatttactttttttcaaatttctcttgctttttctacaatttaatgatatgatatacatcgctcaccattaaacgacatcgaggcgtggctcagtttggtagagcgctgcgttcgggacgcagaggtcgcgtgttcgaatcacgtcgcctcgattgaagatttaaggcctgttggtcaagcggtcaagacgacgccctctcacggcgtaaacccgggttcgattcccggacaggtcattaaagctgttgcagattgcaacagctttttcatttaacgggaaagtacatctgcgcgcggagcgtgccggttatcgtttaacataaaaacggtccgcagtttatagccgcggaccgttttttgtaaaggaagaacaacgtgacgtcttttaagctctgtttacgaaagactcacagtcagtacattctttctgagtcgggttggcctcgtgtgtaccaactttaatcctctctaatgcgcagtagtttgcgtcctttgcatggttagcgcagttaacaattgtacattcgatacaagtattctttccgtttgttaccataatgagtatgcctccttaaatagattttatattattatctgcataatcgtacgatttatgcgcggagggcaaacggaatttttttacatttattcgcttttgactttatcgaaagacgggttaaaagcataaaagttcttgctgtcgagatgatcctggagatccctgagagcctcgccgaaacgctggaaatgaacaatttcacgctctctcagatatcggatcgggtcacaaacgtcagggtctttaacgacacggaggatgttgtcataagtggatcttgccttttgttcagccgccatatcctcaaagaggtcggtaatcgggtctcccttggactggaattcacatgcattgaaaggtattcctcccgcagcctgcggccagattcctgtcgtatggtcaatataatacgggccgaaaccggactctttaatctgttccggcgtcaggttccgtgtcagctgatgaataatggccgccacaatttccatatgtgccagttcttcggttccgatgtccgtcaaaaggccttttcccactttgtaaggcatagaataccgctgggaaagataacgcatggaagctccaatttctccgtccggaccgccatactgactcataataaactgtgccatctgtggatttgactgtttaatttttaccggatactgtaaacgcttttcatatttccacataccttacatctctccttcccatggccatttatctgtcagccacgtccattttgaatcgctctcaactccgtcggttgtaagagggccaaactgctgctgataggcatccacggcttctttccgcagctgcactacatagttataataattcagagcgttcatatcatccggatgcgtatccaggtacaggacgatatcgtccacagcaaagctcgcttcataaattctctgcataagcgttctggcagtttcgttcatttacatgcacctccccatcacaaatggcagatccagctctgtgaatatcgttcccctgcaaaagccttcatcaaggggagatggctgagaccatctctgcatcggcacatagcccatgccgatcgggaagcgatccaaatcttcgcagaatgccatattattctgtccctgcgccatattgccgggcattgccggcatagctcccatgttcgccggagccgtttccatgtttgccggagctgctcccatgtttgccggagctgctcccatgtttgccggagctgttcccatattcatcggagctgtctccccggcatactgcccattctgtcaggcatgctgcccattccatcccgtacgctgccgctgcccgacggcatagacgtatcagcaggcatccatggtgtgcggcctgactggcgggaattcgattctgatcgcggctgtatcattgtgggcggcattccgcagggaggatatccctgatccatgtaccaggatgacatatcaggcatgggatcctgtcttctgaaatccattccgtccggataatgaggattaaaacaattcatattcattaaaacctttcctgagacttatactttatactatgttgcagaaagaaaattgacaaaaaaagatgcgaaaaggaccggctgacggccatttcgcatctttaaaaagcttctgtctatctattattttgttacagttcagccttcggccaaactgtaacaaatgatgcacggaaacggctacaagcgccgttgattgtggtgaaaagtcaaaaacagcgaaaacacctcgcggaatacatcctggctgagctgtttcgttattttcttgtctgcagctctttttccttttctttacaaaggtatttaatgatatcttttcttgttataatgccgataaaatttttctgatcgtccaataccgggacaaagttctggttcagggctttatcaatcaaatcttccatatcggaatccgcaagaaccggtttattgtccgatcttcttggaatctccgtaatgcggatccgctccgcatctctcaatgataaatcatacttatttttaataccccaaagcaaatccccctctgtcagcgtaccgatgtaccttccctgacggttgactatcggaacagccgcatatttgtgaaattccatcgtctccagtgcctgtctgagtgtatcatcatcatttatgtacgcaacttcacttttaggtgttaaaaaaaacaaaatattcatctgccttctccttgtgtgttctatgctgtctaagcacggtactattataacgctcccctttgaaaactttgtgaacaaatcatgatatttccattagatttattaaattttaagaaatacccccggggtgtgtctgattaatatcccagagcctcgtccacaaatactatctctgcttccatcccattcgacggacgctcgatgattacggttgaccggcagattcttcccgggctgctgcagtcatagcagcgatcccccttagccgcacacggcgtagccgaaccgaggcggcgggcgtttttcggtgccgccacattcttagcccgttccattgccctggcaagatccggctctatcttattgctccccacaataaaatatattttttccggtccatagagggtctgcgaaacacggtttcccgttccgtcgatattgaccagttctcccgtctcggacactccgtttgcactggccagatagacctttgcatctcttgcctgcagcagagtctctcttcccgggatatcccaatgccaaatcacctcgttattctccctgagacgctcggccagccccatctccttcaccgtaatgctgcctccgatcgaaacgctggtctctctgatccgggcggaaagataatccgccgcctcttttgcagtactaaaaaaagctgttttaaaaccatgattttcaaaattctgtttcagtatttcctgattcatagcacttctccttgcaatataatcgtaaattaaattgattcacagctctgctctgattattataaccccagttgtacctctaagtaaacatgaaaagatacaaaaataccgccgcactttatgcaaggtcaaatttcctttcccttccataaactgccgcggcacttttatgattatcattattcagttttctcagttccttctgtcttcccgccgaccggttactccagataatccagagcgtcaacaggctgcccttcatgcattaattcgaaatagacgttattgccctcgattgaatagtattttgtaggctcagatacatatcccagcagagttccttttgtaacatactcattttctgccacctggatatctttgagctggccgcatacggctgtgtactcgttgcccaggtccaggactacgtaattaccgatctcctcattggagcctgactccagaactctggcgtctgccggcgcgcttaccggatcgctgatatcaccctggataatcagggccggattgcatttgtactgatcgagagtcgggaagtatacggttgtctccatactgtaatccaacactacatttcctttgacaggccactgcagcgtgcgctggcccccgaaattaagtgtcactgcctgggcggcgccgtttccggctcctgctgcttttgcactgttttctcctttgtctgcggagtctgatttgtcatcggaagaataggaagcgtctgagcttccggccgcctgggcttttgtctcagcattttccgtactgccgccgtttccggttttgttctgcggtatgttttccgcaagaattccctgagtctgagggacttccaggtacggattctgctcgttaatattatctccctttctaatctttaccgctcctgctgcagctactatagtcagcaggcctaacaccatcatcacaaggaacaatttgtccttgaacaactgattcatcttatttttcacgtttatcacctcggttatattcttacctgaccgaagctttttattcaaaaactacaacaatatttttataataaaattccagtattttttcagccgtccacccctccttcgctttcaggccggcgccgtactggtcaaaaccgtaaccatggcctatcccctttaccgtgcatctgatattgccttccgcctcttcaaatgaatatgccggggacggaagccccagggcatattgtatctcctcgcctccatagctttttgggcccacctggatggattccacatacccggcctcgtcttttttaatgacctggatactttccagcacctcctccggcctgacttctggcgaatccggcatcgagttaagcctggcggccaaatcctcccttgtaaacagatatacgcccaggtagttttctccctccacatccccggcggcatccacctgtaccagatagggatgaagttcatccccgtttctcgtcatcccggcgctcagcctgtggaacaagggatctatgtagtctccattatattgtatcacctgtccggccgtcgcctggaccgcatcccttatttttttgtaatttgccagataatcggctttcccccacatttcctccatctggctctgttccagatagtcgaggtccagcgccgactcttcaatccggtccttcccctgcatctgcttgcagagataagtcctggctataatcgcctgtgccttgatggcttccatatcatactccgccggaatctgcagtgccgtaattccaatcaggtattcttccatatcgacaggcgccggggaaccctccctgtccagcaggattgtgcgccccgatacggcgcctctgtctgtatttccctccacccggcctgtccaggccagtgtcgttatatatggtatcaggattgccaacaggcaaaccgctgctgcttttctcataaaaaatccggctccgttccacagaataatagatctcgcattatcattctatgttacgggccggatttctattccaaccgcttatttttaactgcctgtgaacacttcttccgctccgtcatctagccggcggtaaaagcctccatcttccatttcagaaaaccggtctttttaagggtaattgttcccgtgaagctcttctgcaccacaggcgaaacctcctccagtcttctctccagataaaattccgtctccaccgtgtaccggtaccgcaccgtcttcccgctctcttcctccagagccagaaccggttcctgcgcataaatccgctctacaggcgagggaaactgctccaggaacagagtgtagggtattcccacgggaagcaggctgtccctgccctccggggtaaaatctcccggaaaatgggtgtcatacatctgtggcaggccaatgtttgcggcctcctccagttccctgtagctttcggaagtaaataatttttttactatccgctccgcctgggctctgctgctggctgaaaatgtaatatagcagaacacagacgccagaaacaggcacgccgccaggatgaccggcagggaaattcgattattcctgttcttaaaatggttcttagaaagaaaaccggttctcatttagtctaattccacctttacctttttaaggtgccaaatgtcccttacatattcctcaatggttctgtccgaggagaacttgccggaacaagccacattcatcatcgccgcttttgcccattttgtctcatcacggtatgccgcttccactctctgctgcgcatccgcataagaatggaaatctttcaggataaagtaggtatcggctttcgcactgtttttcgtattcaacagcgaattataaatgtcgcggaacagctccggatcctgcggtgcgtagtagccgttgattagctgcatcagcacacggcggatttcctgatccgtattaaagatctctaccggattatagcctccgttattctcaaagttaattacttcgtctgaggtaaggccgaaaataaaggcgttgtcctctcctacctcctcgacaatctccacattggctccgtccatggttcccagtgtaagcgctccgttgagcataaatttcatgttgcccgttccggacgcctccttgctggctgtggaaatctgctcgctgacatcggctgcagcaaaaatgatctcggcattggataccttgtaatcttcaataaagacaacttttatcttaccgttaatcgatttatcattgttaattacatcggccacagagttgattaacttgattgtcttcttggcaatctgatatccggcggccgcctttgccccgaaaataaaggttctcggaaccatatcgatgcccggattatccttcagctggttgtaaagatacataacgtgaagaatattcaaaagctggcgtttatattcgtgtagccgttttacctgcacatcaaaaatcgagcggggatctacatcgatgccattgtgctctttgatatattttgccagacggagtttattctgatatttaatattcataaattcctggcggcacttctcatcctccgcatagattgccagcttgctgatatggggcagatccgtgatccactcattccctatcttatcggtcacccactgagccagaagcgggttgccgtgaagcaggaaacgcctctgggtaattccgtttgtcttattgttgaatttttccggcatcatctcatagaaatcgcgcagttcctgtttcttcaggatttccgtatggagcctggctactccgtttacggaaaatccggccacaatggccagatgtgccatcttaacctggccatcgaagataatcgccattttctttactttttcatagttgttcggatacttctgcccaacttccagcaggaagcggcggttgatctcctccacaatctggtagatacgcggaagcagcctggagaacagctcgatcggccatttttccagcgcctctgccatgatggtatggtttgtgtaggcgcagcatctcgttgtgatatcccaggcgtcctcccactccagatgttcttcatccaggaggattctcataagctccgcaaccgatacggtcggatgggtatcgttcatctggaacactaccttctccggcagcatatggatatcttcattctgctctttgaattttttaatcgccacctgcaggctggcggagttgaagaagtactgctgcttcaggcgcagttctttgccggcgtagtgattatcatttgggtagagaacttcaacaaggttcttcgccaggttttcctgttccactgccttctggtaatctcccttgtcaaaggcggtcaggctgaacgtgttaatcggctgcgcatcccagatacggagtgtgttgaccacgttatttccatagcctacaatcggcatatcataaggcactgccagaacggactgatagccttcctggacaaacacattgcgctgcccgttccagaccgtcttcacataacctccgaattttacctccgttgcatattccgcacggcgtatttcgaatggatatccgttcttcagccattcatccggcacttcgatctgataaccgttttcaattttctgcttgaacatgccgtagtggtagcggataccgcagccataggccgggtatccaagcgtagcaagggaatccagaaagcaggctgccagacggccaagaccgccgttgccaagagccggatccggctcctggtcctcgatggcgtttaaatcaaagcccagctcttccagggcttcccttatctccttctgctcgcccaggttaatgatgttattccccagggcacggcccattaagaattccatggacagatagtaaaccttttttacctttaaatcatcgaatgttttctgcgtcgcaatccagttatcgataattacatcctttaccgcataggcaaccgcctgatatacctgctgcggcgtcgcttcgtcaatcgtctttctgaactggttcttcacattgtcaataatactcttctttattgcttccttatcaaaagtctgcatctgttatcctcctaatcagtcggtggttttttcgactcccagcataaccttttcaccgttgatattccattcttttgcatatcctccggtctgtccgagcatgatgttgtctgccagaacctcgcccttgatttcgtccgtgtattttttgaggatgccggcaatgacctcattctcatcctggaaaacattaatgtggttcattacttcaaaaccggcttctttacgcattgtctgaattttgctgataatttcgcgcacaaatccttcctccaccagttccggtgtcaggttcgtatcaaggacaacggtaatggagttgtctccctcggaaatgtagccttccacctgagccgtatcgatcagaagatcctcttttgtcagaaccacatttgctccgtcaaagtcaaatgtcaggcttccgctctcattcagcgtatccatcgctttatttccgtcgatttcagccagggcctttttaatactgcccagctgttttccgtattttggtcccactgtcttaagctgaggtttgaaactgtaggatgtgaaatcgcgcacatcgctggtaaatatcacctcttttacattcagctcatcttcgataatctcctgatagaattccggaagagctttttccgcctttacgaacatcttgccgatcggctgacggttcttgatattggccgtatttctggccgcacggccgaatacgacaatcttaagcacctcatccatcctcgattccagttctttatcaatgcagttctcatccgccgcagggaaatcgcacagatggatgctctcaggggcatctttgtcgatcttcctgacgaggttctggtagatatcctccgtcataaacggaaccatcggagcggccgccttgcatacggtcacaagtgcggtatagagcgtcatatatgcattaatcttatcctgctccatcccttttgcccagaaacgctcgcggcttcttcttacataccagttgctcatatcgtccacaaaatcctggagcgctcttgcagcttccggaatcctgtaatttgccagatcgtcgtccacttcttttacaagcgtgttcagcttggagagcagccacttatccataaccggcagtttatcgtactccagtttatattctgttgcatcaaaattatctatatttgcatataacacgaaaaatgcataggtattccagagggtacccatgaactttctctgtccttccattacggccttgccgtggaatcggttgggcagccatggcgcgctgtttacatagaaataccatctgatggcatctgcgccataggtctccagtgcgtcgaagggatcgaccgcattgcccttggacttgctcatcttctgcccattttcatcctggacatggcccataacgataacattcttatacggagccttattgaaaatcagtgttgagattgcaagcagggaatagaaccagcctctcgtctgatccaccgcctcggagataaaatcagccgggaactgctgctcaaacaaatccttattctcaaatgggtaatggtgctgtgcaaacggcatggcgccggaatcgaaccagcagtcgattacctccgggacacggtgcatttctttgccgcactccggacaggtgattgtcaccgaatcaatatacgggcggtgaagctcgatatcatccgggcagttgtccgacatgctctttaactcttcgatgctgccgatggaatgctggcagccgcactcacactcccagatattgagcggagttccccagtaacggttacggctgatgccccaatcctggacattctccagccagtcgccgaaacgtcctttaccgatgctctcaggaatccagttgattgtattattattgcggatcagatcctccttcaccgccgtcatctggatgaaccaggattctctggcataatagatcagaggagtgtcgcaccgccagcaatggggatagctatgctcaaacaccggggcggataacaacagccccttttccttcaggctctgaagcaccatcgggtcagcctttttgcagaatacgccggcacatggcgttccctcttccatctcgcctttggagtttacaagctgtacaaaaggaaggctgtattctctgccgatcctggagtcgtcttcaccgaacgccggggcaatatgaacgactcccgtaccgtctgtcagagttacaaagtctccacaggtgatataataagcttttttcttctgttttttgcagatttcaagggcacagtcaaaaagaggctcatattctttatattccagttcttttcccttatagcgctccttcacctcataggtgtcggcgcccagtaccgcatcgcagagagcctcagccagatagtagacggttccgtcctctttcattgccaccttcacatagttctcatttggatttacgcataagcccacgttggaaggaagtgtccacggtgtagtggtccaggcgagaacaaatccctcctcatcctttaacttgaacttaacaatagcggagcgctctttgacatccttgtagccctgcgccacttcatggctggaaagcggagttccgcagcgcgggcagtacggcacaatcttgaagcctttatataaaaggcccctgtcccagatctttttcagagcccaccactcggactcgatatactcattgtggtatgttacgtaaggatcttccatatcagcccagaagccgacggtggaggaaaagtcctcccacattcccttgtatttccatacgctttctttacaatgctcaataaacggttcaaggccgtacccctcgatctgctccttgccgtccagtcccaggctcttctctacctccagctccaccggaagtccgtgcgtatcccagccggcctttctcggtaccatatagcccttcattgtccggtatctcggaatcatatctttaatgacacgcgtcagcacatggccgatatggggttttccgttggccgtgggggggccgtcatagaatgtgtaggtttcgccctctttacggctgtcgatgcttttttcaaagatctggtggtcttcccagaacttctcgatgtttttctctctttctacaaaattaaggtttgtagagactttgtcgtacataattgcttcctcctaatctctgcttataacgatataaaacgataactgcaagctcgcgcacagctcaccgccatcaaaaaaacaggcccctatcccgtaacaggacaagggcctacttgctataccacctattactgcatacttccatatgcgctccctgtaacgggggatcccgtcaagacttactcataccggccgcctgaaattacgctcctctgccgccgggttcagtctgaaactccggagtgattttcatatccgccctactcacaaccggcttccaccgccccggtctcgctttggctttcctgtcggaactactgtctccatcaaagtttttccatattatttccattaattatttttgcaatccttagccttttaattgtaaacactttccatgcagttgtcaagaccggaacagtcccatttatgctgccacagccttttcacacgaaaatccggggttacacagccaccttccatctgtttttgtcctgatctgcaaaattatctgatatttttttatcacccttttatttttttccaaatttgtggtatactatgagcacttggtgaggtattttgaaatccttcgggtcatacccgaagactgaatgagattttccaatcgtacccgccaccatccaagaagataaaactaaggagaaaatcatgtaccaaaggaacctgacactactgacagacctgtatgaactgacgatgatgcaggggtatttcaaggaaaaagacgccaatgaaactgtcatttttgacgctttttacagaagcaacccggatggcaatgcattttccatctgcgccgggctggagcaggtaattgaatacgtaaagaatcttcattttgagccggaagatgtggactatttaaggagcgtgggacttttcgacgaagacttcctcgactatcttctccacttcaaattctccggcgatatctatgcaattccggaaggcaccgtcatgtttccgcgcgaaccgatcatcaaggtaattgcgcctatcatggaagcacagctggtggagactgccatattaaatatcatcaaccatcagagcctgatcgcaaccaagacatcacgcatcgtctatgcggcacgcggagacggaatcatggaattcggacttcgccgcgcccaggggccggacgcgggaacctacggcgcaagggctgccatgattgcaggctgcatcggtacttccaatgtcctggcgggaaagcttttcgacgttccggtcaaaggcacccatgcccatagctggattatgagttttccggatgagctgacggccttccgtacctatgccaagctgtacccgtccgcctgtattctccttgttgacacctacgatacattaaattccggagttcccaatgccatcaaagtattcagggaaatgaaggaagccgggatccctcttaccttctacggaatccgcctggacagcggcgaccttgcctatctgtctaaaaaagcgaaaaagatgctggatgaagccggtttcccggacgccaccatctcagcttcaaacgacctggatgaatacctgatcgacagcttaaaaatccagggagccaccatcaattcctggggtgtgggaaccaacctgattacctccaaggactgtccatccttcggcggcgtatacaagctcgccgctatcatggataaaaaaacaggaaaattcattccaaagataaagctttccgaaaatacggagaaggtcacgaacccaggcaacaagacgatccgcaggatctacgacaaagaaagcggaaaaatcattgctgatttgatttgtctcgtggatgaggtttatgatgagaataattcccttcttctctttgatccggtggaaacctggaaaaagacacacctggctccgggctcctacacgatccgtgaactgcttgttccggtatttagaaacggggaatgtgtgtaccagtctccaaaagtaatggaactgcgggaatactgcagacaagaacaggaaacactctgggacgaatcaagacgtctcgtcaaccctcatgaaattcatgtagatttgtcgaatgaactgtggcatatgaaaaaccagctgctggacagttatcattataataattaggcgctccgaataaagccggggccatgtcaaacaccccgccgtcatccagccggcggggtcttcttcttttacacatatcccatatcagccgtcggaaccggcttcttccatcttttggatccgtttttccagctcatcgaccttatcggacattttcagacaggcagtaatgagccaggtcagcaaaaaagcggcggcagccagcaaggtccaaaaattagataagaagaaaaaagcaaggatgtaaagccccaaaaaacaagtgataaatattcccaagaagttcttcatgcgcacccccttattcttgaaatgaatgattctcagctgattatatcaaattccacaccaaaaatacagagcgggcgggtcacttttcctgctctttaagcacgatcggaatgtgcacgaaaacacctcgcgaatacaatttaactgaggtccggaggacgcgtccggaacggaccatgtccggtgtggcgagggagggctggatgagtcttccgtccctgtgggaggttatcgcggagggggaatccggccggaatgaattgctgcggggaccgtttgcactcttaggagtgcgcatcggaatgctaagctcgtgagggacctcgctaagcaccggcggactcccaggtccgcgcacgcaatgcggacattataccatctctgagggatgtgttttatacgttgcgagacttaccgtcacaaggacgacagcgcagaccagggagcctggaaccgcagagcccagtccccatggttttcctatcaaatcccagccgatactcacaacaaagccggaaacaatacttgctataattcccgcattggtggcttttctccaatagagcgccgccaaagccggcaggcctaccgatgcggcgtagaaggtccatgcaaacatcagggcattatacgcattctttatgtaaagggcgataatcaatgctcctatcgcaagcaccgccgacaggatacgggatatgaatacttcccttttatcggacattttaggattcagcgtctttcccaggtcctgtacaaaagtctgtgtggagataagcagataactgtccgccgagctcatcataaccgaaagaaggcccgccagacaaagtcccgtgataccgaccggaagaatatggattaccagccccggaatgacggcctccgcagttccgtaaagctctttcacattcggcaggatctgtcttcccatcagccccagcatcaggataataaaaatggtgcatccatagatggaggttccccagaacatcccctctttggctgctttccggctcttggccgcaaatgcccgctgccacatctcggccccgccatcgtaaataccaggtatgttacaatatccccgaccaccttgccgtcgatgttaggaatcagcatctccttcggaacattactccaaaaattcccaaagccgccgagatatcggatccccgaaagcggaagcaggatatagacaaaaataatcagcatgaaaaactgcaccacatccgtatacactacgccgaacagaccggaggccgccgtataaaaaataaatataaatgttgccagacatgctcccatctcgtaggtaatcccaattttaccgccaatcattttcacaattaccgcaacggcagtgatctgggatgccacagttcccatcatcgtatagccgatcagcagcgcgatcaggcattttgccgttttactgaaacgtttttcaaacagctccggtatcgacgtaatattatactttacgcctacctcctgaattcggccgctgattccggaaaacacaaacattccgatcagataaggcagagccgtaaccaccgcaagggagccataatcatatcctagtcccgctcttcccatcatcgcgcttccgccgataatcgttgcacataccgttcccgccaaaaccagagggccaaggctccggcctgccacataatagtcacctgcattctgaatccgcctgacgaaataaactccaatcccaagcatccccagcagatacagcgccactattaccagatccagtgtcgtaatgttgctcaaatcctgcataagcaaccctcctttatgatatttttatagaatcagcatcatctcaaaaaaggctgaacccgtctttctcctaagatgcattcttcttttcgtttttccttacggaattcccatggaaaggactctcatgagcaatagattcaatatttcaatagatttgataaaatagaactaagattcccctgttatcaggtaatataatcatctgtaaaatattatagcattattttaacaatacagtcaagatttacctgtacaaagaaggttagacgccgccgggatgtccagcggacggggcggtgagggtgattggatgagtcttttgtccggggtgaattgctgtgagttgggactgcaaagaagatatagtctgcggagtacgttttcactcggtggaatgcatcggccccgtccaccggcctgcggccgctggatcaaaaaatgatgccgccggttctccctgcagcatcatttttctattctttattcgtcccagttgtggtaagttgcctgaacatcgtcatcgtcatccaggagatccagaatccggttcatctttttgatggcgtcatcgtccgttaactctacccaggtctggggaatcatcgtaacatcggcttccatcattggtattccttctttttcaagcgcttcacggaccgctgaaaaatcctccggggctgtgattacttcatagctgtcttcctcttctgcgaaatcttctgcgcctgcatcgagagacagcatcatcagttcgtccgcatccatctcgcactcttctttgtcgataataatctggcccttcttatcaaacatgaaggagacgcttcccggcgttccgacgtttccgccgcccttggtaaaggcgcttctcacattggcagccgtacggtttttattatcggtcagcgcatctacgatgatagcgacgccgttagggccgtatccttcgtatgtaaggttttcatagtttacagagttggcatctcccgccgcttttttgataccgcgctcaatcgtgtcgttcggcatgttgttcgctttcgctttcgcgattacgtcgcgaagacggctgttgttggccggatccgctccgccctcttttacggcaacggcaatctcacgtcctattacagtaaaaatcttgcccttcgctgaatcattcttttcttttttgtgcttaatattggcgaactttgaatgtcctgacataaaaataacactcctctttctataataaaatatgatttccggatcacaccgtgtgctcccgggttaaatattacatggtaattatgctcacaatctttactattctagcactaatgggatgggagcgcaagtattttccggttattatttcattcaatgccttggttcatcgcgctgctaagtccgataggaccttactaattcagcgatggattccaaagacatccgcagaccgggacgaaagactcagccagccccctcgccacaccggacatggtctgttcccgacgcgtcctccatcctcagccaataagtctgcaattatgcttaaccctctcttccctccccacatacaatagtagtatattcttttaatcaggagacttaaattatgcctgaatcagctatgattatcacgccgctccatattctctatctcgtgggagtggtttctgttctcgccgtaatggtcctgaggcgggatactcctctcgtatgcaccctgtttctttttctgctgggcgctctcgggctccactcttttatcggcggtattcaaacggtatttaatgccattttatatgcagccagggaatttatggagatcatcgccactatcgcactggtcaccgccctttctaaatgtatggcggatctgggaagcgatcgtcttctgatggagccgatgtcaaaggtaatgaaaacaccggcgcgcacctggtggcttctgggtgttacgatgtttctgttttctctcttcttatggccctccccgtcagttgccctcgtcggcgcgattatgattccgtttgccgtccgggccggactctcacctctggccgctgccatggccatgaacttgtttggccatggttttgccctaagctatgatgtggtgatacagggcgctccggccatatcggcggcagcagcgggaatttctgcggccgacatcctttcccaggcatggccggttttctgggttatgggcggcgtcaccgtcctggccgcctttcttctgaacaggaaatccatgggtacggcaaagctttcctcaagcggaaatgtcgtaaataaacaggactccgggagccagggcaattccagggcagctctggcgctggcagccgccgttcccctcgccttcctggcggatattgtatgcatgctggccctcgacttaaacggcggagacgctaccagcgttgtatccggtacagccgtcctgcttatgtgtttcggcgccgtactcggttttggaaaacagtcgcctgagaaggtcacgcgttatctgaccgacggctttctgtttgctatccgtatttttgcccccgtgatcgttatcggggctttcttctttctcggaggcggaggcatcacctcgattctcgggaaggttttggcgacgggattttgaatgactgggctgtctggcttgccgcccatactcctctgaatccgtatattgccgcttttttccaattgattatcgggtgtctgaccggtcttgacggctccggcttttcaggtcttccgctcaccggcgctctcgcccataccttcggaaccgctactttcgcctctgttcccgtcctggccgctctcggacagattggcgccatctttgtaggcggaggcaccatcgttccctggggactgattccagtggcagccatctgcaatgtaagcccgattgagctggcgcggaaaaacctgccccctgttctgattggcttaacggcagcttttatagcagcctgcctgatgctggtttaatacgtttaatacgtaacagttcagccatgatgtattccgcaaggtgttttcacagtttttgtgaaaatcccgatttatgcggcgcggagtagtttgaccgaaggctgactgtagctttacctgtaagtaacctgtacacacagtctagatttaaggaggaattattatgtgcggaattgccggctttttcaacccggaaatggattttacgaaggagaaggtgtataatctgaatattctggatgccatgaaccaggcacaaaaaaggcgggggccggatgacgagggtacgtttttaaatgaacatttcggtctggcccaggtacgcctggctatcgtcgatctgctcaccggccatcagcccatgctccatcggtccggatcccggaccttcggtatcgtatataacggagagctttataatacaaaggagctcagagatgaattgaaaacggaaggagcggcctttgacacggacagcgatacggaagtcctattaaacgcctatctggcctggggtaccgattttatcagcagggtcaatggaatctttgcactcgcaatcatggatacggcaaaaaaccagctccttctttaccgggaccgctccggtatcaagccgcttttctatacggcctgcgaggagacgggaaccgttcactttgcttcggaactgaaggcgctcctggcctgcccgggtatccgccccgaaattgacagggacggactgaatgaaatattcagcatcggcccggccagaaccagcggctgcggcgtctttcgaaatatcaaagaagtgctgcccggccattttctctgctgcactccctcaggaaaccgtcttaaagcctactggaagctgaaaagcctgccgcataccgattcttttgaagatacggtggaaaaaacaggtttccttctccgggacgccgtaaaaagacagatggtttccgatgttcccatctgcacctttttgtcgggaggcgttgattcctctcttgtctctgcgatctgcgccagagaactggaaaaccggaaccagaagcttcacacttattcctttgacttcgcgggaaatgcggaaaatttcaaggccagctccttccagccctcccaggatcgtccctttgtagacaagatggtagatttccttggctccgagcatacgtacctcgaatgttccaccaaagaccaggccgatcttctcttcgattcagtcagggcccatgatctgccggccatggccgacgtcgattcttccctgctctatttttgttcccttgttgccagaaagcacaaggttgccctgacaggggaatgcgcggatgaaatcttcggcggttatccctggtttcataaaaaggaatgcttcttagcagacaccttcccctggacgatggatctggaggcccgcaaggttctgctttccgatgattttctcgattttctaaaaatggaggattacgtaaaacacgcatatgaagcttccgtggcagaggttccgaagctggccggggaaggcgcggaggaggccagacggcgggaaatctcctatctgaacctgagatggttcatgcagacgctgttaaacagaatggatcggaccagtatgtacagcgggctggaggcccgggttccttttgccgatcaccgtattatagaatatctctttaatgtcccctgggatatgaaggcccggggcaatattgtaaaagcgcttctgcgggaagccggccgcgggctgcttcccgacgagatactgtttaggaggaaatcaccctatccaaagacttatgacagaaaatacgaagcgctgctggccggacgtgtccgtgatatcctaaacgactcttcctcccctgtgcttggctttgtggacaaaaagaaagcagaacgctttctggaaagcccgtcggattacggtaagccatggtatggccagcttatggcagcgccccagcttatggcctacctgattcaggtggatttctggatgcgcgaataccatgtaaccgtaatccggtaattaccgggtccgcgttctgctacctgttaaagttaaaatgttcccgatcctcctccagaatcaggtcactcctgctgtccgcgtccgtaatgaggcggatcgggcggcagggattgccgtaagccagataatgggccggaatatcctttgtcacgacgctgccggccccaatcacggctccgtcgccgattcttacgccgccaagcactactacattgcaggccagccagacgttatcgccgatatggatttcttctgcaaattcagccatcgttgtgctgccgttcctatccagtccaactctctctttagcaatcagggggtgatttgtggccatcagcgatacattcggcccgaaacagacattatctcctataaaaattctcgcgtcatccatcaccataaggttgaagttggcaaagaaattctctccgatatacgtatggctcccatagttaaactgtacaggcccctggaaataacatgttcttcccattttgccgataatcccgcgcagaaccgcaacccgttccggatcgtattcatccatggcattgtaacggcggcatgcctcatgagccttatgcttgatatccttcagttccgtctttctcggatcaaacatttttcctgcaaaaatcttctcttcctcgttcataatttccccctctgaaatttgctaccatctccctgaaaaatcaactctgaatcctcgtaagcctacccctgaatctcaagcgtcaggtttttcagccactttttctgcctgtaacggatataacttaaaattgttttataaacctcttccagagtaaccatcgcataaactatgtaaatcggctgtttcagcaccaggccgccgataaaggccatcggaattccaatcagccagacgccgctgcagtccaggaacagacagactttcgtatcaccgccgcttcgcagtacccccactatattgacatagttaaacattttaaacggcataaacagcgagaagacaatcagacagagactgacatcccgggccacttctccgcccagtcggtaaagatcgataatctgccaccggactcccgcacagataaaagccatgataaccgtaacaataaactggagtatcaggaagtttttcgcataccgctccgcctttttcagatggccggcgcccagctcatttccgaggataaccgccgtcgctgcgctcagcccctggaacaggacagacataatatcctggatcgtcgtagctaccgtaatagcggcaaccgcgttatccccatgcgcccatacgccagagaatacatcgtaacgcccagcccccagataaattcgtttgcgataaccggggaggccgttgcgaagaatttctttacaaatgaggccgaatagccgaacagctctctgggccgacatgcaatcggagatttcttcagatatacgacaagaaggagggccgtcatttccacaatacgggctatcagcgttgccagtgccgcgcctaccacgcccatggccggcgccccgaatttgccgaaaataaacatataattgaaaaaaatattaattaaaatcgtgcagctgcttattacaacgggagcttttacttttcctaccgccctctgcatcgcaacgtaagtgttgctgacggcaataaaaggataggaaagagcaaccagggacaaataggatgccccgatccgtatggtatcccctccagtcgtaaagattctcatcacatgtttcgggcatgcgactgccggaataaagaaagcaagcgcggcgccgattgccagaagcagcgccagccccaggactttcctgatatttttcacatcattatttccccagaactgggctgccagaatcccggaaccgctgacgatgccaaacaccagcagcgtcattacaaaaaacaccttgttggccaatcccaccgcagcgatggaggtggcccccagcgagccaatcatcatggtatccaccatgttgacaattgtattcagcatgccctgcatcgccacaggcagcgctattcttacagccttggaaaggaatatcctgtccgtcatcataatcttcgtatcttgcagtatcgctctcataatccccttcttccaaatcagtccgccctgctgcgacaaaaagcacagatgttttttaccgccgggccatcaaaagaacgcccgggccacgctcaggcgttcatatacttaatttttcacttccgtttcatcttttttctccaaagcaggaaccgccgtcacggcatgaatcatcttattctcaacagaaagcactttgaagaggtaatttttatattccacctcaagctgctccccttccttgggaatgcggtccagcttggaaatcagaaatccgttgagggtatcgtaattctcgtaatcctcctcatcaaattccacatccagggcttcccccacctcgtccagcggtgccagcccgtcaaaaataaaacttccgtcatcacgtctggatatatattcctcatcctcgtcgtattcatcgaggatattgcctactatctcctccagaatatcttccatcgtgacgattccggctgtctgaccatactcgtccactacaatctccatatgtattttctgggactgcatttccttgaacagcgtgtccacatgtctggtctcaggtataaaatgggcgtcgcgtaacagcccgtccagctcttttaaattcttccttcggttctcttctttctctgcaaagcccagagcatccctcatatgcaggattccgatgatatcgtcgatatccttctcaaatacagggaaacgcgaattgttggcctccgtgagaatataagtaaccgcttcgtccagtgacatcgacgcatccagcgccgttatattcgtcctgtgtgtcatgatatctccggcttctttgtcattcagctcaaaaatattcgtgatcatctcggcctctccggcctccagaactccctgctcatggccttcattgaccatcagcataatatcttcctgtgttacgttatcgtcatcggaattcaaatcaattcccatcggcttcagcaccagtgccgagagcgccgatatgagaaatgtaaacggcctcagcaggatcacaaacacctgcacgattgaaaaaacaccgtatccccacttctccggctttctggccccgcatttcttaggaatcacaatgccgaaactgataagcaccgccagcactatgacgccggccgccgccacactcgccgaataaaccagcatctcgtggccgtcctccgaatgcttcacaagcatctggaaaagctggccgagctggcgcatcacataagcaccggccactattccgattatattcgtcattacctggaccgtattgataaattcgccaggcttattgatcagcctcaaaagtttcccggcccgttcgtttccttcttccgcctccttttcaaggctgtttacgtttaggttctgtatggctgaaccaaatccgtataaaaccgcgtcaatcagaataaaaccaaccagtatcagtatacttaagggccaatacccatcgtccatatttctttcttactcctttaaactgtgatggtgtaaagtctgctgaatacagctttccatcgtttctttcgtacatttattaacgatctttgcaaaagcggcatataaaccggcccgtgcaaaatcctttacggaaaataaatcctgacatctgtcactatatcatcttttaatgaggttcgtcaatgataacctatgtatccagctcaaggcttatcatcagcgcacgatccacgtcttttaacagctcgtcgtcaatatggcagattctttctttcagccgctgtttgtctatggtccgaagctgctcgagcaggattaccgaatcccggatcatatcacacctctttgtattcagctccacatgggtgggcagcttcgctttattcatctttgatgtaattgctgcacagattacagtggggctgtgcttgttccctatatcattttgtataatcagcaccggtcttacaccgccctgttccgaacccacaaccggtctcaaatctgcataataaatatctccacgtctgataatcaatgttctcactctccgtcaaattcttcatgtccttagtattgacctgttttgacccgagtattccgtcaaccggatacttttttcagcgccgtcatcccctattgatttatcatatgggaaaaacaggctgacagttcacggaaaagagaaaaattgaatttaactgagattggggaggacgcgtccggaacggaccatgtccggtgtggtgaggttttggctgagtcttccgtccccggtttgaggttgttgtgagggggaatccggccggaatgaattgctgcggggaccgtttgcactctttggagtgcgcctacttccccggtcaggtttgcgccggggacggaagactcaggcgaaggttttcgcgacaccggacatggtccgttccggccgctgattgtctctaaccttaaatggagaaggtcctgtcgcggccactacgtgtctccggcatgctgatatcatatcttccacaatttttttataataggcgcatcgaaggtttatcgtttttcgttcacggaagctcttagttgccgcgacaaggtccgctctccgcacttaacgcgtgagatattcagcggccgcaggccagcggcgtcctcacctgctaattaaataaaatcttcatatttatcgtcccaataatctttcctgcccacctcaactccatgtcttatatataccctgggaacacgttttcccagcacacagggtatctcatagcggaaaccgccgcagaggtcagccagcctttccattgacagcatctcgtccctgtcccgtccggccagtgtggcccgatcctcctccgccgcaccggggatatccgtcacatccaccatgaactgatccatacagacgcggcccagaatcggcgccctcctgcctctgatcaggacatagcctttaccggaaaggctccttgggtatccatccccatatccggcactaatggtggcaattcgcatcctccgttttgcggtgaaggtccctccgtagcttacgcttgttcccggctcaatatccttgacacaggtcacaaagctcctgatttccatagccggataaagcggcatctccctgttcacctcgtcggaagggtagattccatacatggaaattccggctctgaccgcatccagccccatctgcggcagatccataatcgccgcgctgttggcgcaatggcggaccggaatctcaatcccccgttgctttaacgcatcattaaattccatataacgtctgtactgaagctcggtaaaatccttatcggactcatcggcttttgaaaagtgggtaaatagaccttctatcctgattcccggcagcgtgtgaatccgctccacctcccgtacactggcctcccccggctgaaagccaatccggctcatccccgtatccagcgcaatatgtatctttgccgtcttcccctcctttacggcagtctttgaaagcttctccgccttggaatattcatagagagccggcctgatatcataatccaaaagctccttaaaatagcgctcgtgtgtactgcccagaataagaaccggtttcgtgattttgtgctttctgagtatgattccctcttccacagcagccactgcatatccgcagacaaaaggatcgatggcttttgccaccggcacggcgccgtgtccgtagccgtcggtttttacaacgcctattattccggtcccggacggcagtcccgctgccatcgtctccatattttttatgatattatcaaggttgatttccgcataaaccctgctgtatggttcttccattgtcgtcctcctgcataattgaatctgcaatctccctggccagaatagaatgatcgccttttctctttgccgctctgtctcctgccaggccgtgaagccacacgcccagggacgctgcctcatcttcctggagtcccagggcgatcaggcccgcaatcaggccggtcagaacatccccggaacctgctttcgccatggctccgcatccgctgctgttaataaagacagagccgtccttgcccgcaacaacggaaacagcatctttcaggacgcaggttacgcctttatcttcacaataagcgacagccgcccccggcaaatcctcttttaaagtctccacctcctgccccgtcagcctcgccatctcaccgagatgaggggtcacaatcacattctccgtgaaaaattccgacaggtgaggatattccgccacagtatttaatccgtctgcatctaaaattatgggaacataagccgacaaaagtacatattctgtcaatttcaccacatggcggccccgccccagtcccggtcccagtacaataacactggcccaggcacactcccgctccacaagctcccggaacgcttccggttcctccgcctccatcccttccggataggatgctataattgcctcgggaagcagtgtctggagtatctgcacatttgtttccaccgtcaatattttcaccagacccgcgcctgtcctgtatgcggccagggcgctcagatatgctgcgccgcacattcctccggaaccggccgcaatcagtacttttccgtaagttcctttgtgggaatcctgctttctctgcggaatcctggataaatcagacgtatcatatgtaaaaaaacgcgttccgctgtaaccatcgtaaccgggaaatccgatatcctttacctcgaccctgccgcagtatccctttccggggtatatggcggttcccactttttcatatccgaaggtcactgtcagatccgcctccaccgcagccccaaggatacgtcctgtctccgaacagatgccggacggaatatcgaccgccacggtgaattcaggcttaagtcccgaaaggaacactaccgcttccctgaactcgccctccagctccctggaaagtcccactccaaacatggcatccaccgccacatcaaaacgccccggcagatatccgccgaaatcctcaattgcaatccccagcttctcgtcgattgatatctgacgttccatttcgcccgtccagcggcttctgtctcccactgtaataatagaaacggaaatcccccttaaatgtaatatacgggcaatcgccgcgccgtccgcgccattgttgcccgtcccgcaaaatacgaggacacgggcgtccaaaaccggctttctcccgcgcctttgatactcctgcatcagctcgtccgccacagccagggcggcccgctccatcagaaccatggacaaaatccctatagtctggatagcatacgcgtcaatttctttcatctgttttccggttaccaggcgtctcatcccacgtccccctctcctactgcataggccgatgcgtacacggccgtattgctgattgatacaaacagttttttgattcccagacgtttggccgtctcctccgcttttccgtataacatgacatagggctttcccagctcatccctcaatacctcgatctctctggggccgaaagtgcgaaagcccgttccgaacactttggcgactgcttcctttacggcaaaattgccggccagccgggctgcattacccccggcctgccggcattcctcctccgtatatacacgcgttaaaaaagcctctttaacacaggcttttctaatgcgttctatctcgattaaatccgttccaacacctactatcatgttctctctctggcgtctcctgcttttccaagggcttcttccctctcccgctctttctggtcctgcatgttgcagacacggtaggaaaggcgcatcagactctcggataaatggacattttccactacgacatcgtcgggaacctgcaaatccgtatgagcaaagttccagatggctttgattccggctttgacaagacgatctgcgatctcaggcgccttagacttcggaatcgtaagagctgcaatctgcacctcgttatccttaatgaattgttccaggtcctcaattcctctaatctccaccccgcggaccaccaggcccaccaggcgcggattcacatcgaacattcccttgattataaagccccggcgttcaaagtttgtgtaatttgcaatggcctgtcccaggtttcccgcaccgatgataatcaggttatgctgcctgtctatcccaagaatcctcgctatctcactatataaatattttacattatatccgtagccctgctgcccgaaccctccgaaattattaagatcctgccgaatctgagaagctgtcactttcatcctgatgctcaaatcattagaagaaatccgctcgacaccctcctccagcaactccccaaataccggtaatatcttggcagcctggaaattactgcttttgaaatctctttctgctccacggctcttcgtcaccttctctctgaaaaataaattacttttatttattatagcatatgacaaattattgtcaaaggttttttctgaagccttgaaaatcctggctttttatactataattaaacattaacggctgcctctgtttcacttaacagttgccggtctattaccgattaaacgggaggatatcatgatactgtcttgtaataatatatcaaaagcatttggtaccgactccatactggagcatgtatcatttcatatagaggaacgtgaaaaagcggctatcgtcggaatcaacggcgccggcaagaccacgctttttaaaattatcgccggccagatgggagccgatgagggggatgtcgtcatatcccgcggtaaaacgctgggctatctggcccagcaccaggatatcagcagcgataacacgatttatgatgaactgatggaagtaaaaaaaccgattctcatgatggagcagcagatccgcgaactggaaatccagatgaagcatcgaagcggcgaagccctggaggccctttaccagacttacagcaggctgaatcacgaatttgaactgatgaacgggtatgcatggcagagtgaaatcaccggcgttctaaagggtctcggttttacggaggatgaatttaaaaagccggtaaaagaattatcaggaggccagaaaaccagggtgtccctgggaaagcttcttctctccaaaccggatatcatccttctcgacgagccgaccaaccatcttgatatggagtcgatcgcatggctggaaggttatctgactaattatgccggaaccgtcgtaatcgtggcccacgaccggtattttctggatcgggttgtgacgaagattattgaactggacaacggaaaagccactacttttcagggcaattattccgcctacagtgagaaaaaagcgatgctgcgcgccggtgtcatgaaggcctatttaaaccagcagcaggagatccggcaccaggaagaagttattacgaagctgcgttcctttaaccgtgaaaaatccatccgaagggcggagagccgtgaaaagctgctctccaaaatagaggttctcgataaaccggtggagttaaacgatgcgatgaatatcacgctggaaccgaatatcctaagcggcaatgatgtcctgtccgtacgcggtctgacgaagcgctttgacggccccgtgctctttcagaatgtggattttgacattaagcgcggggaacgcattgccattatcggaaacaacggcacaggaaaaacgactattttaaaaatcatcaacggactggtagaacaggatgccggggaaatcacgctgggcgccagggtccatatcggatactacgatcaggaacaccaggtgcttcatatggataagacattattccaggagattcaggacacttatccgaacatgaataatacccagattcgaaatgtgcttgccgcctttttgtttaccggagatgatgtcttcaaactgatccgggatttaagcggcggcgaacgcggccgcgtatctcttgcaaagctgatgctttccgaggccaactttctgatcctggatgagccgaccaatcacctggacattacgtccaaggaaatactggaaaatgcccttgtcaactatacgggaaccgtactttatgtctcccacgatcgttattttatcaacaagacggccacaagaatactcgatctgaagctgggaaacctgattaattatattggtaattacgactactatctggagaaaaaagagacgatggaacagctctttgctccggcggcagactttgccgcctctgccgccggggcgggtgcatcttctgcttcttccggggccggctcttcttcgatggactggaaacagcagaaagaggaacaggcgcggattcggaaaaaacagaatgccctgaagaaaacggaggaggagatacatgcccttgagaccagggatcaggagatcgacggtctgctctgcctggaagagatcttttccgatgtctcaaaactgatggaactgaatcaggaaaaggattccatcgcatccaggcttgaaacactgtatgagacctgggaagagcttgcagaataacgataacctgctgcggcatcagtcccttccgccgcagcgcgctctccacggagcgcggctgcactgcctggctctcagactttctcccgttttctcacgaccggataattttccaaaatatcatggtaacgaaaacagttttccctgtgatcgttgataattccgcatgcctgtaaatgagaatatacggtaatcgagcccatatatttaaatccccgcctttttaaatccctgctgatttcatccgacagcagattccttgccggaaccttccccttctgatgtcccccctttgtgtttaatatccgttccctttccatttttccctccgcttctgttccggcagacctgtaatatccccatgcatcccctcttttgttaaaacgtccgctgctattcccagtatatcacgatatccgcagtccgacagcaggacttgctacgcgaaatctgctctgccgccgcttccggggcctaaaacagttgacagttagagtgcaaggtgttatcttatagttagagtgcaacatgtactcaaaaggaggataagaatgatacagcaggtttctgattttgaattggaactgatgaaaaccatctggggaaacggcggaaccgccctttacgcggaaattgccgaggcgttggaaaagaagggcacgcccgcaacaaaaaatacgatcatttccctgctgtcccggctgattgaaaaggactttctaaagactaacaagattggacggcgcaacagatataccgcccttgtctctgaagccgactaccgcgccgcccagacagaaacatttctggataaaatctatgagggcagcgctaaggatttgatttccacactgattcagaaggaaatgatttcacccgacgattacgagaacctcaaaaagcattgggaagggagctgcctaaaagatgattgaactgttaaagctgttactctccctgtctttttcagggacggtgctgattctgatcctgctgctgagcagaccgctttatcggaaccggttaagcaggcaatggcaatattatatctggcttatcgtcgtggcccggatgctgcttccctttaccccggagccaagcctgacaggaagtctgttccaggcctccggcagcgccgttatgcagcttcgcccggatggaccggagcttttaaacggccggccgatcccgggcaccgacttaacggacgaggatataccttccgacagcagcggtgcagagtcagccaagtccatggaaccgggagcagccgggctgaaaatcgcgttgcagccggccgcacagaatttatggcttatcttcggcttcctctggctgatggccgcggccggcctgctgatacgcaaaataactgtatatcagagctttatcaaatacctgcgggccggacgcatggaagttacggatatggagctgtgggaacggctgggaaccctggccgaacgggcgggtatcaaaagggcggtggggctttatacaaacagccttatttcctcccctcttttaattggatttttccatccctgcatcatgcttccctatgaaaagatggctgattccgactttgaaaataccatccttcacgaattgatgcattacaggcgcagggatatgttttacaaatggctggtacaggtgacaatctgtctccactggtttaatccgcttgtatattggatgggcgcagaaattaacagggcctgtgaattttcctgtgatgaagccgtgatcagtaccttcggcaggcaggcgcagctggcctacggggagactctgctgcgtgcggcggacgccaagggaaaatacagcgactctctcgcctccgtcacgctgagcgagaatgcaatgctgttaaaagaaaggctggatgccattatgaactataagaaaaaatcgaaaataacaattagcatatcaataatcctgtcagctttgctgttatgcggatttgcgttaacaggggcttataccgtccgggctgcagataagccccaaagcccggaaaataacgcctcccggcatgacggccgggcgcctaagaatttgcagacaaaaacggcagaggcagctcatatcattcgaaaggaacgtcctaatctcgagatttccattgatagcaatgccgctgtgaagctggtccccacgtcagcgaaagacgtgacggttgactatgcagataccctgtatgatgtttccgtggaaaatgaaaacggcgactggaaggtagatatcagctatattggcagctattcaaaatacacctccgcggttctgcatatccccgacaccgcctttggggaaatcggcatacacgtagatgaagccaccctgtattttaacagtgtattccggtatggtgaaaccatcaatacaaaaatcagcgattatgcctcaatcttctatacggttccgtccggctttcagggaactctgaacatgacggcgcctgactgctaccttgaactgtattctgatgacggatataaaaattgcgatgtgactatatcaaacggctccacattcggtgacattgcggatggctttaccaaacgcgggaatcgtttcgtatattccgacggaacgaaagccggagtgatcaatattgatttaggaagcggcggatatgtgtccatcgaagccggcggcagcgaaacagcaaagccggcaaaagaaccggcgccagagcctgaattgtatgccccggattcctccggaaagcttgtcatccccgtctcactccatacgattggtgaaaatgaagctgtctgtatcggtgaaatcccggacattcgtgacgcggtaagctttgaatatgatattacctgtggtgacagccagggaacgatatctgccggtttgcgcagacccggactggacagcgactggtttttccgctatcaggtgaatataaccgaagacaacagcacgctgcaaacacgttttgataaccattttaattctgccatgggaatttatgatacgtataaaggcagctaccggttctatattcagaataaaggcggcaccttatcagacatatcagggactgtcaccgtacagtatggcgcggtgacgccggattaaacgataacctgctccgaggtcaccgccatcaggcaaaagccctgcgcaatgacgctattccccgcgcagggctgtaagcaggcggtctatcttctcatccccggcctccgctctcagggcggcctccacaaccggtcccccggtttccctcatgcggcgaagcacttcatccggcagttcaaccgtctcaacaccggattccgagaggacttcggtacatgcttcaagctccctctcatccatctcccttgcataatccaccatctcctgcgccgtctcggttaaaagcttctgttcctcttcactcagagaatcatagaagtccatacccaccagcatacattcaaaataaatcttgtggttggtcaggatcaggtatttttgcaggcggtggatcgagttggatacaatgagcgggagcgtattttcctgtgaattaacgagtccctgctgcagtgcggaaaacacctgatgaatatcataaactctggtctgcgctccgagactctgccaataggccccttctgtcgtattggaagtaaaaatgcgcatctccagcttggaaaaatcctctgcctcatcaatccgctcgttgcccgtaagcacacggtaatgagccggaaacaccgccagaagctttatccccttggcctcacattcctcctccagcatacggcgggcttccccatccttcaaaagtttgtcaatctcttccagggaggcatccgacagagttgacgcccataacatcgctcccatcgtatccgtagccgccggcccaatgcgcatttccaccgtttggttaagaagaggcctgtcactgtcgttgacgtgccccagtgtatcatccggaaatatctccacccggaaccggcctcctgacttctcttccagcgccattttaaaacgccccgctattttctgggtggtactgaatgcggtggccgaatgggtcaggagaatcacgttctctccctgccgttcctcctgctcctgcctctgttcctgctcctgtttctccaataggaggctgaaaagctccgtctccggctgtgccttattgcagccggaggacagcagtaaaacagccgccgccaaaacagccgccgcttttttaagcggacggcgtaaaatatgcacagcctgcttatcatcgttcatcttcacgctgctcctctcccttcatccgggtacggaactgccccggagtctccccctcataccgcttaaatacacggatgaaactctgggggagttaaatcccactctcagtccgatatcccccaccgtctcaccggtctctatcagcagaagctttgcctgctcaagacggtaccggttcaggtagtcgagaaatcccggcggctggtgttcggcaaaaatcctggaaagatagggggccgtaagccccagcttcccgctgacgctttcaagcgacaggctgctgtcgccatagcccgccctgatcagttcttttgcctcctccacccgggcatgtgtttctttatttccctcctgttccccattaccggtacctcctttcaaaaagcggcttaccagctggattcccgggttctccgccctgagcttatcaaactcttccatcctctgctgcaggtccgaccgcgcctgaagccagagtacatttaagtcgaacaagtttccggcaaagtcacttccccctgcatacacatcgaagtttcgctccgccagacggcgccggagtgatttttcaaacctctccagttcccggtaccatgccgcctccgtcatggcctggttcatgcagagtacgattcctttctcagacccgtccatatccacagactgcaaaagcgccgatgccccccagtattcctcactgtaccgtatcatctgaagaccgtatagctccgcatccaccggactgtcgttcccatgctcccggctgcggtaataaagcgccagtacccggtactgtccgtcaaatggaaacggactttcaatctgctccagcgtctccctgaccgccccttcctcccagctgctgccagtcagaaggcccttaaacaagtgttcgctcaatgaggctcccaccgactgcaggatatcccgcagtctctggttctgctccctgtcccctgccatgatgccgcgcagcagctcctgttcggtggcaaaagacgccctgtccgccagagcatatccgggattcttctgggaaatcagagagtcgagaagcgcgcggaaaggccggtaaatccgccaaatcaggtaaaccgccgccagcgccagcagaaccagcgccagcagtccgtatgtagccagagccttaacaagtctgggcgtctccacatccagatgaatcccttccatccgctgtataaaataccatcctgttctgcccgactggtaaaccagaatatatccgccgcccgatcggtaaatctccttgccgtcttcttttctttcctgctccgaaaccagcagcttatctgctcccggatatgcgagcatgtcggaaaataccgggactcctctgctgtcatagacataaatcatgccgcttccggtcgtctgttccgccgccaggcccatttttctataaagttccggcagattcagcttcagaatcactctggccagtgtcttggaatccggatagtccataatcatccatccttccccatccaggcagaaaagcccgctttcaacttcctgcatgtcctgcagccctgaaggctccggctccgcttcatccccgtatccattaccggctccgcgtaaaagctcctgccgggcgaaattatcactgttcaccacacttttgtccgaccccagcaccttttccgaatagggcagataaaggtaggcttccatcacatcttcatcccgatccacaagactcgacagctcctgcaccacattcatcgcctgctgctggagcaggtcctttcccgaaaccatcagacggctgcagtcctgcgcctgtaaaaggctctccatctttgccgtcagggaagccgccgccttgtcggcctccaggctccgttcttttatattcgcaaagcagacatccgactgtttctccagatactgctcttcatagagatttcttaaaaaacagccgaaaaaagtgccgattattatggtaagcgccagaagaaccatcagcgtctggccaaacattcccgaaaagcgaaaattaaaccgtatccgtttcattgattttacccccgctctatcgtaccataaaacagctcttcggacaaggagggcggggtccgttgattgcgcaagttcacttttcgttactgttcacacgcaatgtaatttagttaagcaggtgaggacgccgccggtacggccagcggacggggtggtggggtgtgtatatgagtctttcgtcccggggagagattgtcgtgggttggggctgcgggcgaagataaagtctgcggagcacgctcccgctctgtgaaatgcatcgcgctgctaagctcgacaggacctcgctaatcagcgatggatttaggcggcatccgcagactttatcttcccctccgccccaaggccaggttttcgccgagacgaaagactcagccaagtgtatcggccccgtccgctggcctgcggccgctgattgtctcacgcgttaagtgcggggcggaccttgtcgaggccactaagagcttccgtaggcgggaaatacgatatgccttcaatgcgcctttattaaggaattgcggaatgtttgatatcagtttgccggaaacacgtagtggccgcgacagggtcctcctcatttaaggttggagacaatcagcggccggagcggaccatgtccggtgtgcgaaaacctccgcctgagtcttccgtccctggcgaaaccctgaacgggggaaggaggcggaatcaattctgcaggggatatggaagcccatccgtgcttaatgaggtttctcacgaatttagcacggctatgcgcttcgaaaagtgcaaacggtccccgtaagaattcatttcggccggattcccctcacgacaaccttcaaccagggacggaagactcagccatcccctcaccacaccggacatggtccgttccggtcgcggctgaactgttacgtcaaatccccggagcgcatgaaatcggcgccccggggacttaaacatggtaaaaacctttttgataaatcggcagacagccgtacctgcgaacttatcagaccgtcctgaatgtaaaggtatacgtccggttcgtttttccatccgggccagtcaccgtcacaacggcgggaccggaggccggtacggtaaccggacagcggctggacgccggggcgccgttgacggtcagcgcggcaatccggtcggacattgccaccggcgtcatagtcaccgtatcctgaagcggggaaatcagcacttcatactcgtaatcaaagggaacgaatttattagaaacagcgtattttaacctgccgtcctccagcagctcattttccatttcctgccccgctttgtatttgaaatcatggcccacgagttctgcatccgaaaaagtgacattgctcagctgtgcatttgtcttataatcaaaatacaggttgctctccacgcggtcgctttcgcccgtattatcaagctcaatacgcgtaaatacattgccgtcgtatttccccttgtattctgccacaacctgttttcccgagatggagaaaccggtccagttaagagtattgaagctgttgccgtcctttgccagaattgccccgtctccgcgcctgtcgtcgctgacgctgtccggcccgtaattaacgagattttgcaggcactgttcccataccatcagataatcgcttccaacgccaatccggttatgtccggtgtacagctcccgtacctgcctgccgtcctttgtataggcagccataagctgctggtgcagcgagagcagcaaatcctggcggacaccctttgccccaaactgatccgctacccagtaacggttgactccataaatatcggaagagaacagcagcccgtgttcacggtcataaatcagaatggatgcgtcttcatggccgggaagctgataaacttcaaacttgcagttgcccagatccagaacatccccctccgacacaaggtgaaccttgtcgcctgtgtatgtgcccgatacagtgtccacgacagtcggatttccgcttgtgtaatccttggcatatgtctctatactccactctccgtcaatcggacctaccctgtcgcagaagtaaacatcaagtccgttgttgtaagcggctgccatcgcccccttatgatccccgtgattgtgtcccagcacaaaaacataaggtttggtcgcaatcttattgacctggtcaatcagagtggttgtcgtattcgtgggcatcaggccgtcgtataggattcccatcttgctgccctcaatataataagcggcagcctggaagttatcaaaaaaccggtaaacggccgggtaatcctctgagccttcatgcagcttgtctgtggcaaaatcatgccaggccggacggtcaatccgccagataaagcggctgacagggctgtcttccagtccgtccctggtggcatatgcctccacctccacacagaagtaaacattatcataaggaaaatcccagttattattcagtccgaacatcggatccgtggagtatcccggaatataatcaatccactcgccccattcgtcgctcaaggtgacgccgttgccccgatccccgacaaacagccccttcatctgcggatgggagatgttgaaggcccggcagcgccagtgcaccgtggcattctttgtcgatgtaaaccagattggccggcagcgtacgaattttctgtgggaaacaggcatagaccacaccggggacacgattcttctgctgattgcttcaattatgatccgcgcctgcgtatctgttatcccgtctgacggtcccagcgtccggtcggttatcccccgcatgaaattgcgccctgtcagcgtatttaaggcatctctgcattccggacttatttttgccgcatcctcgaagtcagacagataatcttccttaagggcttccaggcaaaacgctctgcacaggattaccgccgcatcctcgcgggtcatgacggacatcggataaaagcagtcgtccggggaggatgccgtcaggatgcccatatcgagcgccgcttccaccggttttacataatcgtttcttcccgtcacgtcaaaatagtttctcacgcgctccgctgtcatgatattgccttcattgtcaatatcggttccgtcgtccatgacgccgttataatgataccagccgaaatagtcggccagacggattagaaaatcgcctctcgtcatcggacggtccacttcgatagagtgtgcgcctgaagtctggcccgtatggaagttgacggaatagacggtcccttcaaaggaccaggtaatctcaacatcatatccccccaccccgtcacgcatgacaatggttccgtcgggatctacggatacaaggtgtttattgcttgacctccatgtcccttccgtcttctcttcgccgtcaatcttggccaccagtttcaccggctggataaattccagcgtataggtctggccattcatattgatatctccgccctggatataaatgcctccctccgggctgcctgcgcttaccggcgccgttgtctcaccggctccttttgtcgttccctccgttcctgtcgcaacggcggctgccgcacagccgggcaggatcgaagacaggctgattgccgccgctccccaggccatgccttttacgaactggcgcctgcttatcttcccgtccggccttccttcctcaatctctgttttctcccattctttcattcggctttcctcctccaatttaattctgtaagtatttttatacgtcccctgcttcttgtccgtttacctgcatttctctcttaaggtttacggaacaggattctgctcagaagcaggcttatttcaaacaaaaacagcatggggaatgctaccagtatctgtgatgtcacatcaggcggcgtaataaacgcagcaagcacgaataccgcaagaatgacatacttcctgtttttcctcagcattgccggattcagcagtccgattctggttaacataatcacaacgaccggcagttcaaaaacgattccgaatgtcaccagggtggtggacacaaagctgatatagctttcaatggataccatcggggaaatcgtctgccctgcattcatcccggcaaaaaacagcagcgtaatcggaagaacaatttcaaaggcaaatgccgcccctattaaaaaaagcagcattccaaaggtcagaatcacaaagcaggactgccgttccctgcgcgtcagccccggcctgataaatccccaaatctgataaagcatcaccgggcatgccagtgacacgcccccgtcagggccagacggacataggacagcaccagctccgtcggggctatgtaaacaaattgaaatccctgcgccttttccatcagacgttccgtcagccaggccgcctggcccagacagatcagtacggctgcaaaaaaacatatgatgcaggctaccagccgttttctgaactcttccagatgggataccagcgacatccggcactcctgcgtttcttttcgaaagccaaagcgttttaatacagcggtacggcttctgcccgtctctttctccaattccatcaccccgcttatcttaaacttctgtctgctcctccgttacctgaatcgtatcgtcctcggctcttttactgcttcttttaaaattcccgatcgtctgccccattgccttgccaagctggggtaatttcttcggcccaaatatcagaattgctatgcccataattattaacagttctgtcgtaccaagtctcattcttttcttcctttctcctcttgagcagtttcctgctatacggcggcttcgttagatatccttataccctccgcctgttcccggttttcacttttcatctgtgaggcggtctcttccgtcatcacggcctgtgtttccgccgtttttttcgccgcctgctccgtccttaccggtcccgcgtcctctttccactctccttcgaaggaatttacatacttcttaaaagagcctaccgcctgtcccgcaagcttccccagctcaggcagtttggacggcccgaagactaccagagccaccaccaggatcaggattaattccgttgtcccaagtttcatttcttacctccttctgacctgtgaacttatttcaattttttgatagggacagcatagcagggaaataagtctttgtatattttcaattttttatataaaaaggggaacatgtgatatttttatccataagatattatttgttcattataagaaaagcgggataagaattgttaaggcagaaaataacccccaaagcagcgcagggagtcgattttctctccgttgaccgctttgggggcagaatgataaatttaataaccagcaggaatttgctctataaataagcttttttaactgcttttaacagaatcttaggcatcttattatacggcgtaacggggcagatctttttgttgacgcccatcagcgtataaactgcgattctggcggctctcacggaatattcttccgtaaataccatgtcctccgggatctccacgaactggcttatcattgcaaagttggtggaaccctccggaactaccgggggacgatcgctcatcttgcgcggctggaactgtgcatcgatatacggcatataacagggaataacattgatgaccgtctccatcagcccggcaatctcttcctccgggatatgaagctggtgcaggtattcaagcagcatctcctcaccggtacagtccttcatggctttcttcacataatcgccttcccggtcggtataaaggccgtagccccagaatatcgtgacatcggacggctggttcgggaagtgaggctgagccgccactacgctgctcatcttccatcctgaatccttaaatgtcataagcgcaccgctgccgggaatattgccggtgaatgcctcgatcttctttaaaatcttgtctccacggcaggtaacggtaaagctcagccagttggactcattctcttttgtaaagaatggctccggattgccgagacggcccggtttctttgctgctatcttactccagagctcgccggatatgggcttttgctgcggtaccggcgcaggggtatggagatcgcccagagtcgcgctgtcagtcatgcaggcgttaatcatgaaacagagatcctccgctcccagctccacagtctcagtctcgccattatgattcaggtggagtctggtaaccgtgatatcgtctccctctgcaaaatctatatcctctaccgtacaattctccttaaataccacgccctcttttctcaggaactcttctatcgggcggatcacgctgtcgtactggttcagcgggcttctcgtgacgccttccagtgtctcaattcggctgaattcaaaaatcattctgttcatataccggcggaattcaaatacgctgctccaggtctggaatgcgaatgtggtctgccacatatgccagaaattcgttgtaaagaaatgaggcatgtccttaaaccactcctggatcgtcacatcatccagttccttctcatcggtacgcagaagcttcaggattctcattctctcagcctgggtaaagcccatgctgcggacatccagaatattgccgtccctgtcgaccagacgtgctttggcgcaggtgggatgcgcatggtcgaaattcagaatttcctctgttacgcttctgttcggctgtgttaaggaaggaatcgttctgaacagctcccagaagttttcgtatgtctcttcgttcagcatacggccgccgcggcatacgaaaccgccttccggcgttccgattccatcattgctgccgcccagaatatgcattccctcatagaccgtaatctggctgccggggaatttgcagtcccttatcagataagcggctccggccaggctggccagaccgccgccgataaaatgagccgtccgtccggtatagtcgcggcgcttcatcacagcttcctctaccgcctctttttggatctcatctttctttttcttcgtgtcgtaaaccttttttgcagctacgcctgctgcagcagctgctgctcctgtcgccaggatgcgccccaattttttctttcccattggatagaccttctttctctcaaacactcttttggccaaacagatacttaagaaatttttccctgaattgcccgtttctaaccctcccggaactgaatttcctgtaaatttgcacgttcttgaaatcggatatggcatcctgcagggatttgcggtacttgtctgccaaaaacagattacaccatacattataccatatccgattctaaaagtcactatatgtagttttcgtatctacatctgtttttctgatttatctgattgaataacggttacggcggcatagaatgttactgcatctgatcattccatattttcctgatatagtctgagaagcttcctcatctcctccgcaaccggctttgtgtcaaaagaatactctctctttgtcgttttctcccgcggcatgtggttctgcatatcaaaatctcctacggaaaaaccgttggcatacaagaactcctccccgtcaaactccaaattatagaccctgtcgttatatggcttcatatagatataccggagttcctcctcaccgtccttcgtaagaaagagatccgcgccgttcaaatcaaccgcgcgcaccgtacagatgctgccgtcccttctcacccggaccggatggccttccgtcatcagtatctccttattgcccattgtctttacgtataccatctccgcttccattccgctgataatatttgtaacccgaatcggcattccgtccatattctgtgccagatcgcctatcctgatatcttctatcgcccgttctgaaccgtcggccataaggatccttgtatcttttccaagacagccaaacttgatatggatctttttcaccttttcattcgccggatcttccgactccgtatccagatcgctggagacgacaatcgtcacctgcccctcttcgtatttcatggagccatgcttacatttgatcggcagaatgcagctaaaatcagcgagcatcactgcggaaacaatcttcattttcatcaggtgttcccagtccgacggaaattcataggtaatcttattcttttctttttcattataggtgacaattatgttttttgccaggtcatctttattaaaaacaactgttccgttatccaggctccagattttcatctcaaaatctttgaagtaaattcctttaatcttatctgcctcatctactataaattcaaattcatcgtttaactcgattgtgatcttggccggaatatgaatctttacatatacgtctctaccaagcgccagccgcactcctgtatacttgggatagtcagccgtctctccccggtctgcatccctgtcgtacaaaagctctgtgtatttatgtgacttatcctttggcttcggtgattccacagtcacggccttcacaatgtattttgttccctcaactttcagaatattgctgtacacttttgttgactgcgcacagagttctccctgagcattgacctctgcacagaaaaactccgcctgtgtctgcagttctctgtcgtcggattgaatcagcctgcccgcatttactttcatggtattctcaatatccgtgatattttcatcaaagacagccatgctctccagaatctgtccgtttgtgatatccatgaattttcccattaaatcaacaccgagcatctccctcgtatatctgccagttacattcgtagatacgaccgtgttcggatcatacgcaatatcggatacctccatacagtccctggggcctaccaggtacccgtccagcctctcctgctgcccggcgccgctctttctccacagcgcgtcgtaaagcagaggacactcccgcttaaatacctcttctcctccatactggctgaaaaacacgtctctgtgatcttctcttgacagatcataggagagagaacggccgttctctttcagctcgcatacaaatttttccctcagctgcattaaatttctttccatgaaacttcctcccttatctttcatgatattatgttacaggtcagccttcggctaaaccgtgatgttatatttcttatgtataagaccagacgctgcgcccatcttcctccgggcttatcaaccagagcttttctttaaagattcccgcgcaggcaggcctctcctccgtccatgacagcttttccggcagaacggattcttttgcaaaaccgccgctgccgcgcttggcatagataccgtcccgcattatgagaaacaggccgtccttcctggacagaagccagaaatattccttttctttcggattctccacttcgtatttccaagtccagtctatcccgttgtccgtgccaaacagaagaatctttttttcagtgccgactgccgcccacaccgcatcctcccactccgccagcttgaccagatacgcgtcatccgtctctaacactgccataagctgccatctgccatccgggaagtcccctttcctgtacagctcggctttatggctgctgtcaggcagaacgcagacccacacgctgtcaccggctctgagtaccgctgtctgtccatccagcaaaaatgggtacccccattgactgatacgtgcctccccggcctgccagcagaccaggacgcccgttcccatcagcgtgtccgtgccaaacagccacaggctgtccttatagcctgccgtcccatacgcgcgccaggctccggcctgatccgacaaaactttaaattcgacgccgtcctttgcctcgtacaaaactgaatcggaaaacgcatacagcttttcaccgcaggagagaagttcccggttccaggaggaagctgtatctttttccgggagaagcagctctttgcaatgctgttcttctttccactgtccctcgctcacgttgatacagacgcaggcgctcgcatgctgtcccagtttgttggaggctttcagcaggaaacggtccgaacttcgaaggctcacctctctgcttcccttttcctctacctgtccaaatcctgtaagcatacattcctgagcattcctcacctcccagcgaagagtcgtcgtttttcccttcccaatcagcgagtcatccgcctgaaacatgataatctcaagcggctcctgcttatacaagggaagcgtatattcgcagtcctcatatcccggaacgttctggatataaatctttgccacggtcaggccggcaatcgcatcagagataagattttccaacaggaaagaaatgctgtactttttcttaagcagtaccgtcccgctgggaatcaggataaaatatccatccggcataagtttgatatcccactgatgctccccctttacccagctcgggacgatcgcgctccccagctcctccgaacagaggcagccctccccggttccccagtaaaaccgcacataaatcctggagaggccactccactccggccggctctctgtctcatgaatcccgggcagttcatcctctttcgtcagcttaaactgatttttaaagctgatatcatcatcctccgaggcattcatcacatacagttccagttcatttttatacggccttttaaaatctgtggtgatgtacaccatattggcgggaaaccaatcaaaaataagattttccctcatctaagcctccctcctgccgcatgggcaagacttcctttactccctgctcatgaaaccgtcttccaagctgtttttctcctgatgcatctccgctgccacaggcggttcaccgatctcccgccgttccaaagcaccgttctttctacagtaccagaaaaagggttctttccctcctatctgcggaatccccgcccgttccggtcccgtcaggatgggatagattggcaggcgtaggttaatgtgctccagcgcatccctgaaaaagacaggatccggctttttctcatagaccggaagaatccccgtcctgatgtggatactccctgtcacatccaaaagaaaggtgagcggcactttttcatgctgcactttgagttccaggtcactgttgcaggaaaaatagggatccttcatcgtctttgcaccatacgcagggtaaaatgtccggtaggtacttcccgtctcctcccctctgtaataaccgatcagcccgtccgacgcatatctcacatctccaatccttgcctcataagtattttcttcaaatccgtacgtattcctctttccaaaatcctttagtgccttagaatagggcagaagcccctgccacctgagggaaagtccgccccgcagcatggcaagcggtctcccagtcagcatggaaagctcctgatcttcatcgccgcctgcggatatccgctctgaaagtctttcatcaatcagcttcaaaaatgcccggaacacgccgtccccgctctccgtcattccgtggataaaatggcgcatgtgaccggaaagcgttcttttcttcccatcctccagcgcggtaaaaccggcacgcgtacttccatccggaagccagacaagatgcagatttccctcatacccgcccgcttcgtcataaatactgatccggctgttcaggaaatccggcatgaggtaaccgcagacaggggaaaattccggcgccttttcctcccagtcaaggcaaaggctgccgggtccggaaagcctcggcggcaacactccatattccccgccgccttccggccttatggattccgctaccgcaatatcattcagataactgtcaagctccgctgtctgcccgaaggtgtctatcatcctcagtgcgtccgggcggatgaatccggctctgacgggaagaaattccatgttgacattcaatgaaagctccccgtaatctccgacttgagcccgcacagcatcggcaaagctgacggctgtctttgtcaccccgaatatagggaaggatactgcctgatccttgcagagaaatgcctcgttcaacccgctcatgttctgggaaagaaccggaagctcctttgctttcccggcaatggcgctcaactgccggtacagcgtctcattataccggaatgtctctatatggcgggttatggcatcgctcagtccctgggccgcgtgaggggttataatcatgcgccctctgtactgtttcaattcccctgcctctcccgcgcctttgtaagaataatcgatatcgccgagtctccagtcttccatcgtgttatccgggtcagcctgcgtccttgagggcaggaaatggagccgccagtctaaaaacagcggattccacggcggatgaaaacaggtgactgagacggcggacggcagcgtacctgtatattctttccctgagcctccctccgccagatagaggaacgcagtctcatcatataattgataagcagcctgagggacgtccgctctctgtgtgaattcatcacaaaacggctttatcgttttgctgtcccaggatattttaccgcctccctccataaaggagacggaggtgatcacctcccggtccctgcgcactgacaaaagcccgtcctcccggaacctgccgtctgttccaaacagttttgtcctgctgacgccctctcccgcagccaaaatcacaggaacttcgggaaagaaaaattgctcctgcgccattttaaactccggtgtgaaggactgatccgccagaagcgacttaaggttctcctgctgtctttgcctctttgcctcctttcccaaccattcctgtctgtaagtttcaatttctccgagaatccgttttccctcttctaacaattcctcctgcgacagaggctgtttgataaaaggaggcggcggataactgtacaacagcatataggtgtaccagacatcatacagctctgttttcttcgattccacgatatcagagagtgactccgcctctttttgaagcttatttaaggcagaaactgctgccctgaccggttcttcagggctgtttttattgccgtcggccggcctcagaagccattctccgctttttcccgactcgccaaaccggccccggtgaagccgatcctcggttttgaggattccgtctatctcccccagttcccccaggagatcagactggagaatattcaaaatccgttccagctcatacatatctctgccgttttgacgggatatttccttcgccgccagggcggacagcgcctcggccgaggaatagccaagtgccacgcggaccgctccctccggtccgccggtcggataatcagcatcttccccctcccactttacgtggaacaccgcgccgtgcagcagcagatccgaatcattttcttccctccatcccccgcccaggaagaatcccatctctctcagtttttcttcgtattctgtcccggtaagcccatataaaggagaatttttccgatccgcgtaccagccggccaccgtgtagatcagctctccctccttcacgtccttcagatcgtcgtgaaatccgaacacgcttctgcaggtctgatagcaggcggcaaaatacggcgtccccgcccccagaaccgtcagttttgaaagatactctcccggcggcgccgtattctcatatggataggttcttcccagatagcggcataaattctctttgtccgaaaattccggtatggagatactccccacattatccctgccaacgtagctgctctccagaatccatgacttatgcgtgattaccggcttatcgggcgttgattttacgatggtgagccttgtcacaaggtaacggtccggcactgcgggatagtcaaagccattttccgtctccatgccctgggtcagcccgtccggcagaataaaatgcagatggacgccggccccgggcgcggccctttttttgaatggctgcggctctatcacgccgccgaggagtgagacaccgttcagcagttcataatttaccgctatatccgcatactctctggaattcccgaaccggtttacgatgagggcctccactgtcataggcaccaatatcatgtcttatcctcctcccggcaaaacttgacctccgatgcgctgcaaagcatctccagagcaaattctgcggacgtaaattcgttatgatcggtatgaagtttctccataaacatcgaggcgagagataaaacatcaaccatcctgcccgctctcaccggtacagggtacagctcatccgataatttgtcgcccggttttttatctccctccgccttgatccgcctgatataaattcttccatccacggtacgcgttccgaaatgaagtccctccgaaggctccgtcacaatcacctcgtttacgctcccgtcaaaaatccctatcataacggtgtcagacagcgcttccagcctgagaagctcacgctcccggctcccttcccgcccctttacctccattcctttataagctccaacgaggcgtgagcggatcaaaaatcccataaaatccgtttccggctgaagattttccttagccttgcacttgataagatggttttcatgcatccgctgccttctgggccggcgaaggcggttcgctgctttctcacgaaaaagtccggcgaaagccccggaaagttcccgttccgcagcaatgcctcctcctatactcagagcgccctccaccatcgcctcaatccaattttgatccagatgaaaaaaacgtacggattccatggggaggaatcgctcgtcaggaacgaggtattgaaacggaacatcatataaaagccatgtctttgcaatccaatcaagaacactgtccggcagctgaccggctgtcgttgcctcaaacgggaactttctgtcatttctgtctgtatccatccaggatttcatgattctcctcctctcgtataataagtttgtaagcaagaaaaaccgcttacagacttattcttttttgggtataaatggtaaggatatctaagaggtactcccctcatcccgattcccatctatacagttgatagttacatttcaatataggtagatcctgtggtatgatatcaggtagagtctgatgtccgaaggcactgcttctcctcctttcagccggcttcgtccgagactgctttgaaagcattcagcctggcacatacggcacattccgctgacacagaattttcatccccagccgttagccccagcaaaaaaggctgactgggtgcatgctcattgcgcgagggttcggtcaccgtatgcggcacaggataaaccttttgcttcaggcttcacaaatccccatcggaatggaggtgatatcatgttaaagctcaactatatgtccaccttgtttgtaggtattgatgtaagctcaaagaccaatgccgtctatgccatggactttgaggaaaacaaatacatctcatcgtcgtttggcaataaccagccaggcgccgatcagcttgtaaatatgattgccgaatgcatgcagaagcataaaaacctggatacggttcttatcgtgctggaatctacttctgtatacagcgtgcatatttcaaacttcctgtcggccagcgaggttctcatgccctacaggccttacgtattctgtgtaaacccaaaggccgcttcgaattaccgaaaatcctatatcggaatggaaaagaccgatcccacggatgcatatctcatcgcggacttcggcagggtaggccgcacgaaaaaactggagccatggcgcggcgggcagttcatatccctgaaacgccttacaaggcaccgtatgcacctttctgagtgcatcaccagggagaagacttatatggtttcgaatctttatctgaagttcagtgaacttcagctccttgaaggtgatgacaagccttttggcagtctctatggtgccacgtcctcagctgtcctgacggaatttttgtctccgcaggagattatcgatatgccggaagaggatctgcttaccttccttgcggggaagagcaggaaccgcatctctgacctatcaaaaacttcggaactcctgcgcaaggcagccagggattcctaccggttagacaagtgcatgtatgaaccactgagcatatcactggcaagctcgtttaactgcatccacgcctatcagaaagaaatcaagctgatcgagcaggcgattgagaaatgcatcaacggaatgaaccctaacgccctgctcatccttcaatccatacctggaataggtccgatatgggcatccggaattctatcagaaataggcgatataaccgtgttccattcatccgatgcccttgccaaatatgccggcctttactggcctaagggtgattccggagatttcacttctgaggacaacaaaatgtcgaaagccggaaatccctatcttcgctgctatcttggcgaagcggcaaacagcgtcaggaagcacatccctgaatatgctgatttctatgccagaaaatatgctgaggtaaccaaacatcagcacaaaagagcactcgcgcttacatctcgtaaattagtacgactcgtttttggattgctggtcaaaaaccaactgtacaccggcgaaaagctggacaccgaatataatattgagtcgaactgacattcggttatacgtaaaatataccgaaggtctgttaaagttacccttttttctgaaaaacatatcaaaatcttcttcaaaaagttcttgacatatcaccagaatgcttttacagggccgaataccgacgcggcgtccccgccgccaaccagccattttccgagatcgccggccagatattccataaagcctgttctgatgctgccctgatgctccctgtcctctttccctgccgaaacagaaaatgcctcaaaatgtttcttaaggatttgaacttcccccgcccttctgcgctcacaaaaaaccagttttctccaccggcagagatctcctgccgccgctttgctgttcaacatcataagacggccgagctgccaggccgcggcatacttcatatcaaacagcttggtctccctgtcataaaggatccggccgtccgctccggcgttttgcccctgaagggagctgtccggcttctccggagtaagcggtccccggtaccaggacgcggtctgttcccccgtcctgacaatgtgattcaaaacagtatatcctttatgcagccgttccacagcatgggccggaccgcctggcagcggctccccgctctggtacaggctgagcctccctgaatccagtttttccgtcagggtgcggaaactctcctccgatgattttctcgaggaaaattcccagtgatacagagataccatctgaatccaatcctcattcttccaggcctcctcccgtcctccgggaaggaaaccggaaaatccctccaatgaaaccaaatgggcggtgcagcgcaccgtcctgtccaccgcctggggaaaacggctgcacacaataacgccaaaatatccgggatgtgcgattatgttatccggcctttcatgcagatccgtaatccggacatgcgccagccagggcagctccgcttccatcggaactgctttcttgaacagttccggactcatccggatcacactgcatgtattttcccagtcttcgccgggctgtaatcctgttccggccaagggaaaaaagcatttttcttctttgttcaaaagcttttgcagagtgacttccgacagctttggttcctcatcctcatcaaacagcagcagcgcaatccacggagtttgattcttcaccggtgtattttctctaagcgccgggccgcctccgatccgccggtcccacggatacgcttttttattaaaaatgatgtgaggcagtgtaaccccataatcggacaccataccggccggtggataagcttcgtatatctcccccggttccaattcaaaccgcttctctcccgcaaaaaagcggaactctgctccgggtatctcctccgccacagggcttgtcacattctgatgcactttaacccgatattctccggcatccgccgcaggcggcgaggatgccataaactgcatttctccatactctttcatcattcttctccataaacggctatatccctgcagaatgtaatctgttccgtgaacagattctccgcattttcagccaggctgccgatccggccgtcaccctccagctccatccccctgtcattcagccacagcagcagctttcttctgtcttccactgcggcctccgccatggcggtcttcgaaaattcctggtttgacagctctttgtcttcctcctcttttacccggtaaacagggcggcagaaacaccagtcttttaaaacggcttcctcctccgccattcggtcaagatccaccggactgtcggggaacacatagacttccgtctccttcggcgttaacagaacgccggtcagagcgtgttctatcatagaaccgtcaccagacaattccttccccacagcgcggccggaatattctcatactgctcctcaaccagaaaggaatcatgtttcaccggcttccatactccagctctatcctgctttttcaccgtcacaaccgtctcgcaggacagcgggactccgcccatgggcagaataaacaggctctcgtttcctccgcggcatggaggtttgctgtttatatgaaatgcggcattcggcacctgcgtatggattgacagcttaaagccctctccgcgcacaaggctgaccggcatcttctcactgtctttcgtttcctcgataaggccgtcactcaccgtgaccgtggcataatttttacctgatgcgcagtccggcgaaccggttttaccctgtcttgcgtcaccgggaacacactgttccagaaactcttcaaaggtcagatattttataccgctgttcccgctgccaaactttatcgtaaaagagatgatccaccacttcaccttcattttcccggtaaactcaggcccccaaagactcagcgccgccgatagttcaagcgtaaatgtatgatggacaaacaggcagtccacccggtaggatgcgccgattccagccgctatccctatctgatagtagaacggcttccaatacatgagaaagtcggccctggcataaaaccatgcgctcagatttccattggcatatctggcgtcaattcctcctccggccatgatgcaggacggcgtcagcgcaaaatacagcccgcctgaaaaactcagattccgatttaccatccaggaaaagccaaggcgttccacttccggataatgggaaggcctctcaaagccgttatgatatccgccgagcgtcagaacgaaatccccttgtgaactccccgtaccagacataaaaagcaaatccccctgtcaggtggcagtccggggaaaacaggtaagattcattagtcagcgccgctcttaaggagaaaatcccttcctccgggcagattacggcttttaaggataactccgcctttgcaatcgtgccgagcgtcatctgtcccaatcccagcagggcgatttccagatgatttcctactgatacggttaaaatggcaaatgattttaccatctcaaaggacgtaaagcggattcccgcggccagccacatttcctccccggagattttcatgtaccgctcctttagagtgcggatcagttccgcctcgtttccttcctcataaaccatacgaatcagcggaaactccgcgacctgcccgatgtcggggagaaggagctccctctgatacccaaacccggccgccacgccggtcacgtagaatgcaggcggtccacccagcatctttctgagcactccgtaggcgaacacggaagggctgccttctgtctctgtgtaagagccgatgacagtcaggcttaaatcacctgcccgcagaagcaggctgccgtcaaattcaagcggcctgtccgaagttttcatgaatgaaccgcccagagaaaaggaggaggtgttaaacgacagctccatccctttaagagtaaaggaaagatttctgaaatccgaaaggtccattgaaaatccaagtcccagaaaccggattgccatcattttgcagcacacagcggtatccaccataaaagacagccggtctttttcatatccgattccgatgcgcacaagctctagcgggccgagcgtcaagtccgccttcagccagcatatggtgtctgcgtcttcataggcgacttgattaactttttcatccgctgtttcccacagcccctcacaggctgactcagtcccggccggtttgcaaaggtgcagggtaaagggaagctgccgcataggcgcgtttaagctgccgcacagcgtcactcccgttccggtctgatacaaaaggctgatgccgtttaggaaaagcccgtcaagagcatgcatgctctcccctatgacaggcagtgagctcaggcgtatctccggagccaggctaaccccggcccggaatgttaccggccgctctctgccgtccgcctccagaaagagctcattgtcatttctaaaccaggcgcggacggcaaactgattctgtcccatatcatagtccaccgatacagtatagaccggaacgccaatcgctttcaggatatccggggcctctcccacggacagaagattccacagggacatgagtccaaattctttcccattgtaaaatacgccggagaaccgccaggaattaccctccccgtattttagagcagagaggtacaaatcctcttcttcatagcttaattttccccgtatctgtaacgactccccgcctccttttcctccaactgcgtaaccgtcaaaatcaaacccaatctcagacagtgtcagactttcgattcccatcagccggaatgtcccggtcatggtaacggaaaactccagccggtcaagcggccagaggccggcaggcagaagaagcagcagacgttccagcttaaggccgccaagagccagtatttcgtccggcaggagctcgtccagcttaaggccgaataagcctccgaaatcctcaagagacggaagctctgccggaagtttatctgcgctgatacacagacgccctccgctgtacgccagtaagaatgccagctcctttgttccgataaaaacgctccccaggattccaaaggagccgtaagggccgcggtcacaaatatgcaggcccggatgtccgattttaaagttcccaaacagcgtccaggttccttccgccgtcagagacgcctccaggcggctcgggtcttcttttgactccgtctcatagactccgttcatggacgccgacggaagcgccggaagaatctcagacggaaatgtctgccccgacagggccagaagcatagccgcagctttgccgaaagacggcagactgccgcctgacggctctgccgcagctttccagcgcccggccttctcatcatagacggttacggccggaaaagtcacatcatattccccctcaggcagcgcttccgactgcatccggacatcaccttctatctcaccggaaaatggcatctgcacatacttctccagttcctcaaccgatgagagctcacactcctccccattgatataaaatatcgtatgccacctgttttctgcgaattcccactgatattccaaacgataccgatccatcccgcatctcactctctgaaagcctttgcttttacagcaatttatgtatgcatttttaattttacattgcaataaacattcatttcttatatgatactatatatgtacagtaatattcaatatatatccatttatttcggaatttttatgtaacagttcgctactgttcacagggtaatgttccgcgaggtgttttcgtgtgtatttcacacgaaaatcccgagttatacggcgcgacgtgatgaaaagtgaacttttcaccacaatcaacggctctttttgccgtttctgggcatcgcgaagcgtgttatggaactggtagatttttatatcggaggagtctttatgcatttttattatttcacttttgacagcgccgagccggccgtcagaatgaatctggccggtcaggaatatggcattgaggcggcgcttggggaacttggatttgaaccggcgctctcttctctatggattggaaggaaacattttcatttcctgagtgagatagatttatcagaacatgatatcaaaaagctgaatctgagactgtatcaaaaccaggcggttcagaccctctgcgaaaggtttgggaaaacagaggactcggactccccgcttccttttcggatacagactgaattttcatggaacgccgttctagaaaattttgatacgggagatccgtccgtcacttacgccgaaatgcagctgttcaattttgcagatgtggaaccgctgtttgatgatttctgctattacgatgaaatagaggacggcccctttaaaaaagcgtttcatgccttccacacctgcggaatctcaagcagggtgttccagcttgccaaactcgaatatcttgccacccttccctgtacatgcggactctgcgcattcactgataattcctggcatttttatcagatcggagtcttctaccaaatcgacgtatcggacgatccaaatcgcttcaaccgccctgtatctcttggctttgaacaatattcccccgtcttgaatgccgataatatctacgcttttctggcttatgcaattgtaaacggaagctgccttctccatatgtctcccgtcccgtacccggccggtttactgttttctccggttgagattacagggcaggctacaggggaagagcgccccctctccgcccctgccccattcaatgcgggaacaaccttcgatgaggcctttatctacaatgtgggtcaggcccttttagtaggcctgtttgatcagggactgctgcggggatttttcgattttggccttcctgacggatttaataaacggcattttctggctccgggctgtaatgccgctgccgccgccatacaatggctgatcgcaaataatcctaccacctcctccattatcctgtcacactggcatttggatcatacgaacatggcggttcaggtcccagcctgctataacctgaactggtatgccccatccgggtatagcagccccagtgccatgaaaatcaatcattttattgccgcgaatggcggcacgctgaccttgtacacagccgtctctgccatgccaaactttggcattaacctttccatccacaaaatcactactgttggctctacccacccgcatcacaatggtatttttgccgaacttgtttttgcaaacgggaataaaacgatgctggcgggagactgcctcctttccgccgtctcagcagcagcaaccgcagctccttatcattatatgcaggcttcccatcacggcggcgtctactatagaactacggctgccagaaatccggcggatatacctgcctgcttgccgcctccggcaggttttgcacttgtctattactcctactcattccccaacaggcatcatcatccgtcctatgtagcggattacatcgggcagggatgggttaacagacgggatacccacggcgcccccggactccctgcgccggttccccctgcgccgccgcttcccgccgtgcttgtgaacggggtcagaggatattccattacataaaaatttatgcccggccctcttctttctttgatttcctccctgtcccgaccgccatggcgaggacaggagaagtaaaaacagccggagctttgaagaatatgcatctcttcaaaactccggctgcttttactgcctcattgagggcggtaacctgtgcgcagagcgtgcagattatcgatgtttctcctatgccgccccgcctgccggtccaatctgccctcccaggctttcatcggaggccggtccgtttccgcccgaaatgatgccggggtcgtcgtccatctcaataaaatcatcctcatccggcttctgtccctccgtactgatccccagcgtctcctccatataccggtacagggaggggctgagctttttcatatcggctctcacctccggcttgcagtaattctcaaacaggtttccgaacagcatggaagaatcgttgtcaaaataagatggaagaggctgagctatcccactatccatcaggtactgctggtagtcggccataaaggcattttcctctttatcatttccggttgccgaggccacatactcgccaaaggccagggccagcgactccggttttgtgaatttcagttttttgtaatgggtatccgtcttatgatatacataataaatcccctgctcggtccggggggcggaataatatttcttatccgtgaaaaacataagctcccagcctgactcattaaatttgcggatccattctcttgggattccttccatggcctccgtgatccccttcttttcctcagccgtgggcctccttttcccctgaatcgtaatatcatactgcttatcccgcagtccgttttcatcataataattcatttccacatactgattggccgccatctggccgttttcgtaaaaataatatttatgcgcatcaaccatgcggtacccacggttgtacatcttatatttggaatcaaaccaataccaggcgcctccggcatggagccacccctttgtcagctccccgtcctccgccgcatggtaccagcactcatcatcctcatcataggcccagccgacagccatggccccgtttcctccgaaatagtaggttttggatccgattcgcttaacacctgtctgcatatatccgctgctgctgaaataataccagcagccgccgtaatacaaccagctctttttgaggcaggttccgtcggtgagccggtactgccagtcttccccgtcgccttcccactccccgtcaacagaagggtccggctctcccgaagtctccgccgcctgtccgtctatttccgcctgctgctctgcgtccgccgaagccgtctcctgcacaggaagtgtttcctggccaaacaccgtaccggacgacaggatcatcatcaggcagacagaaaaaaatagaagcccatatttattcaaaacacagcgcccctttcctgtatgttcatctaattgcttgtaacagttacgacagcatgaactgttactgctgtttctattattttatcgcatggcaggtgaaaagtatagaaaaaaattcttacatcatttataataatattacagttttctgtccacactccgcaaaaaacggcgcagagaattgatcgatttttatgaaagcgaggttttcccatgagacataaacgactgctggccatggctgccgccatcctgctcctgcttctttacgcatccacaatcgtcttcgccctgatggacagccctctgtcccagagccttttaatggcttccctcttctgcacgatcgtggttccgtccattctgtatggatactatgtcataataaaatatagaaaggacaagaataaccgttgataaatattttcaatacaaatatcccggcgaaaacccgaatcgaatcataagcagtaacacagcaagacttcaaaggaatattttattggaatttgaacataaaaagcaggtacgagtgctctgccctcctgtcaagtagacaggggacagagcactcgtacctgcttttcaatcagcgttcaaaagaaacagttcctgcgtccctttgcagcctgctattttctcatgataatctcatcccgtcccggtccattggaaaccatcgtgatcggaacgccgatttccttctcaatttcttcaatataagcgcggcactccgccggaagctcattgtaattgcggataccgcggatatcgcatttccagcccggcatcttcttgtagaccggttttgctttttccagcttacatgtcacagggaaatcttttacaatctcgccgtctatctcatatccggtacagattgtaagctcgtccagatagcccagtacgtctaataccgtaagcactgcctctgtcgttccctggatacggcagccatatctgctggcgacggcatcaaaccagcccacgcgtctcggacggcctgttgtcgcgccgaattcccccttatcgccgccgcggcgcctcaattcgtccgcttcctctccaaaaagctcacttacgaatgcgccttggccgactgcgctggaatatgcctttaccacagtggtaatattcttaatttcatagggagggatacccgctccaatggcgccgtaggccgccaatgtggaggaggaagtcaccatcggataaattccgtgatccggatctttcaaagaaccaagctggccttccagaagaatattctttccttccttaagcgcttcgtaaagataagcggatacatcgcagacatacggctccaccatctctttatatttcaacatctctgcgaacagctcttccggatccaaaagaggcttatgataaagatgctcaagaagaacattctttgtctcacataccctgctgattttttccctcagactgtcggcgtcgaacagctcgctgacctgaaaaccaatttttgcatatttatctgaatagaacggcgcaatacccgacttggtggaaccaaaggactttccgccaaggcgttcttcctcgtacgcatcgaactgaacatggtaaggcatcaaaatctgggccctgtcagataccagaatcctgggcttcggaaccccttttgaaatcagatcattaatttcattaataagataagggatatttaacgcgacaccgttaccgatgatactggtcgtatgatcataaaacacccccgacggaagcagatgaagggcaaaacggccgtagttgttaattatggtatgaccggcgttgcttcctccctgaaaccggataataatgtccgactcttttgccagcatatccgtaattttgccttttccttcgtctccccagtttgctcctacaattgctcttaccatgaatcttttcctcctaggaatcattgcactgttactgtgcgttagtcatatgtctagcgttgcattccctgaagacatttaaacaggaatgcttacacgactagaatacacgaatttatctcataagtaaaatcaatattatttatgtttgtcataatctacaattatcttaatgatgtcgttccgttttaacactttcagcggagcagtcatttcaacccgttaactcgtcaaacagctttgccgctgccggtgacatataggccttatccgaagttacaaggcagaactgtctgtggggcatctcctcctcaaattccagcctgaaaacgcggttcagttcaagcgcttcccgggcaaaccccgacatcaggcatccgacacccagattacgtctggcaaactggacaatcatatcactggtagccagctcaaattccggctccagaaatatccccttttcttccaggaactgatccatgaaccgcctggtactcgttttcttctcaagaaaaatacagggatattccagcagttcacggtaattcactttacggccgcacagttcctctctgaatttgggaccggcaataaaaatattctccacctctttcacagggatgctctttacacccggttttgcctcaaaaggcgtactgataataccgaaatcgattcttccctcattcagaaattccaaagtttccggtgtcggtccattggaaacattcaccttgattttaggatatctctcatgaaaccgttccagataagggagaagataaaactgcagcgtcatgtcgctggctccgatccggatttcccccgtctccaaatcctgtattctcttcagagtatcttccccatcatagatagattcaatacctctttttacataagaatgaagaacttcaccttctctggtcagctttacacccttggaagtccgcagaaacagccggcatcccagcgccgtctcaagctggtgcaccgcctggctcacagccggctgggaaatgcagagtacttccgcagccgccgtgattcctccgcatctgcatacgtaataaaacaccttataatattcgagattgatttttccatgtttatccatcttcagcctccctgttttctatcattcggactcttacagtgtatttgattcccggggctgagtcaatctcaaatggagatttaacttaggtgtggaggacgcgtccggaacggaccatgtccggtgtggtgagggggatggctgagtcttccgtccctggttgaaggttgtcgtgaggtgggaatccggccggaatgaattcttacggggaccgtttgcactttgcacggatgggcttctatatcccctccagaattgattccgcctccttccccggtccaggttttctccggggacggaagactcaggcgaaggttttcgcacaccggacccggtccgctccggacgctgattgtctcacgcgttaagtacgggggcggaccgggtcgcggcctctaagtgctttcatatgtgtttgatatatgttggatatgggataaagtatttgttagagtatgtttgttggaagtttgatacatttgatgtttcaacagattgatgactatgacctgtgctcggagcgtgcaggttatcgttgtctcacgcgttaagtgctggagggcggaccttgtcgcggccacgcagtgctaccgtgtacgggaaatacgatatgccttccatacgcctttttaaagaattgcggaagatttgataccggcctgccggaaacacatagtggccgcgacaaggctctccccatttaaggttggagacaatcagcgcccggaacggaccatgaccggtgtgcgaaaacctccgcctgagtcttccgtccccggcgataacctgcccggggaagtaggcggaatcaattgcggaggggacatgggagtccgccggtgcttagcgaggtccctcacgagcttagcactgttgcgtactccaaagagtgcaaacggtccccgcagcaattcattccggccggattccccctccacgttcaacctcccacagggatggaagactcagccatccccctcaccacaccggacatggtccgttccggacgcgtcttccaaacctcagttaaatctcattatacattaatctccgccttcacgcccaattccgcctgattagcatccagcagaggccgaatcacctcatcaaggaattcttccacctgctcttttgcgcgtccggtgtatctggaaggctccattgccctgtttaactcttccagcgtcagattaaatgccggatcggcggcaatcagttccaggagattattatcaagacctttttccttgacattcttaccggcctccatggaaagcgtacggatcttctcatgcagttcctgcctgtctccgcctgcctttacggcatccatcataatattctccgtagccatgaaaggaagttcggacatcagccgtttttcgattactttcggatacactacaagcccgtctactacattcagatagagatccaggattccgtcgattgccaggaaaccctccgggatgctgaggcgcttgtttgcagaatcatccagggtccgctcaaaccactgggtggacgcaaccatcatcgggttcatcatatcggccattacatagttggcaagagacgccatacgctcgcttctcatcgggtttctcttatatgccatggcagaggagccgatctgattcttttcaaatggttcttccacttctttaagatgctggagaaggcggatatcgttggaaaatttatgggcgctctgcgcaatgcctgccaggacgctcagcacgcggctgtcaatttttctggaataggtctggccggataccggataacagcctgcaaatcccatcttgtcggcaatcctctgatccagcttcctgcattttgcatgatcgccgtcaaacagctccaggaaactggcctgggtaccggtcgttcctttagaacctaatagcctcagggaatcaatgaggtaatcgagatcatccaaatccagtttcagctccatcatccacagagtcgccctcttgcccaccgtcgtcggctgggccggctggaaatgggtaaatgccagcgtcggctgcgctttgtacttatcggcaaatacggccatctcattgaggacgttgatcagtttcctgcgcaccagcttcagcgcttccgccataataatgatatccgtgttgtctcccacatagcaggaggtggcgccgagatggataatacctttcgcctgcggacactggacaccatatgcgtagacatgggacataacatcgtgacgcaccagcttctctctctcttttgccacttcaaaattaatctcgtcctggtgctgcttcaattcgtcaatctgttcctgtgtgatcggaaggccgagttccttctccgtctccgccagggcaatccacagctttctccaggttctgaactttttctccggtgagaaaatatactgcatctctttgctggcataacgctctgaaagggggcttacgtatctgtcgtacatgattttacctcacttttctatttctggccgcaccgtcttgactccggtgcataaaaccggcttccaccattcattatagcggaagccgtgtctgttctcaattgctgtttcgccggtattactgtctgtcggcaattccaagacgtctgaatacttcattgtatgcgtcttccacattgcccatatcgcgtctgaaacggtctttatccagtttttcatgagtctctttatcccagagacggcatgtatccggtgatacctcgtcagccaggataatctgtccatgataacggccgaattcaatcttaaagtcgattaactcgataccaagctcaccgaaatatttacgcattacttcattaaccttgaatgcatattttgtaattgtgtctatctcttcctccgtagccagttccagagacagcgcatagtatttattgataaacggatcgcctaaatcgtcgttcttgtagctgaattccagggttggacacttgaattcgattccttcttccatgcccatcttctttgcaaaactgcctgcggaaaagtttctgataattacctccagcggtacaatctccactttcttaacggccgtctccctgtcgcttaattcctctactaaatgagtcggcactccctccgcctcaagcagtttgaaaatgtgatttgtcatacggttgttgattgcgcccttgcctacgatagttccttttttcagtccgttgaatgctgtggcgtcatccttgtaatctacaattaaaacgtccggatcttcagttgtgtaaactttttttgcttttccttcatataacaaatctacttttttcatctgcattcacctgtcctttttatttataagttttcaatataaaagagcttcatttcagtagaaattataatacaatggctgagtaaaatcaatactgtgttttattaaattaattaataaccactcagggcgggcattatgaatcgcattatcatccgcgcgctccgtctcggttctctggtggaaaaaaatgatctccccgcttttgatacggacggaaatacggaaaacatcaaaaaaacggccgccattctctgtaccatattcgaggattgtctgtgtgtccttaagttcctccaccgtcagaaatgcctctttgaatgctcccaccgcggccagatacagcacagcggccaaaaaaatcattgataaagccgctcttcttttcctgctccttctaagccggagcttcctgaaaaaatgtatcaggctcctgcgtctctttctccgtaaacggctgtttcgtaaatcatctgcatgtttgggcaaccgcatcgtctcctttgctgctgcctctcccgcaatatccagtctccaacctaactatagcggattcctgcaaaaatgtaaagaaaaagcggacattctgaaaaaaaccagaaaatccgccaaaaattatatttccgccttctcattgcctatgataaatctctgttcaaattcttctgcaggcattggtttataaaatacaaagccctgaatgtaatcgcaccccaattcctttaggatgtccacgtaaccccttgtctcaacgccttctgcaattactttcatctccagctctttggctgtctccacaatatgtctgacaagaatgcgttctctggtatccgattcattctgaaaaagcgatcggtcgattttaagcgtgttcaaatcagcattggtaagcacactgaatgatgaatatccgcttccgaaatcatccaacgcgcagctgaaaccgaactctcttaattgcttcacaacgcggcttacaagctccacctggttaaggacaatactctccagtagttcaaactcgatgcagtctttgggacatggcaccttattataaacctccttatagtggtccagaaagtaccggtaattaaacatgttgctggaaagattcacactgatccgtatcttttttccgtagagatcgatccatttgttaatataacggcataccttttcaaataaatataaatcgagatcactgatcaggccgttgcggaccagctccggaagaaattcacctaccggtatcatcccccgctccggatttatccatctgaccaatgcctcggcttcatgaacttcccccgttttcagatccactttcggctgcagataaagcttgaattcctcattttccattgccggctgaagcatttgttcaaaatcatagcttgtcagattcttatcctgatatgtcattccatagacttccatatgggaattcctgtaggctgtctccggacactcagaccggcagatatcggcattatattgggccgtgaaataatcggcaggtttttcgggcagcagatatattcccattcccatatataccttgccggtcccctcattatacggcatatcccgcacgtgggcattgaaatcaattaagtaatgaaatatttcatcataatccttcgacagcttcaccagcatactaaagccgtccacagaaattctggcgacatactcatcttcctttatccattcggaaattgccttatatactttttcaaccagccggtcccccgcctctctcccgaaaagccggttaaaaatacggaatcgctttatcttcaagctaatcagcgcatattcttccggatttttcccgcagacctcctcatatttttcccggagccactgctcatttttcatatcaatcatgatattgtcctctgacttatgtattattctgtatatattctaacttcaattctaccactaagactctgttttcacaacggtgaaacacttacttcgccaacttttcattatcctccgccaccagacgataacctgcacgcaccgcgcacagcttaccggcatcaaacgaaaaaacaacccggccggaaattcatctttcccgaccaggctgtctgctgctttttcagtcgtttaatcacccactgaactttccattgtagaggaaaccgtaccgtcgtctacagcatgttccactccgttttttatgtcctctgcaccgtctttaatgtcgtcggcaagtccgtcaagcactcctgtgctttctctcgcatcggtaccgtttgtcggtccgtttgccataccgccttcggtgctttccgcactgattgcagactgagactgtcttgtggattcggtcgatttcgtattattacgtccgtcaccgcatccggatgctaaagccataacaaaaatgagcataaggcctaaaacgatctgtcttgattttttcataataacatctcctttctaccacatagtatgtacagcggagaaaggatttatattgtcaaaaactggaaatttcttttcaggcattcatcagcctatcacatcggccatcgtatacaatccaggctcttttccggccaggaacttggcggcctgaattgctcccttggcaaaaattgcttttgaataagccgtgtgggaaaaggtcaccacctcatcttttcctgcaaaaatcacatcatgttcgccgacaatggagccgccgcggactgcctggatgccgatttcttttttatcgcgttttacacgctcggccgatctgtcatatttataatgataggcatgatccatcgcttcattgatggaatccgccagtgcaatcgccgtgccgctcggcgcatccaccttctgattatgatgcttttctacaatttcaatatcaaagtcagccgcggccagaacctgcgcagcttcccttacgagtttcagaagtacgttgacccccagggacatattggcggagcgcagtaccgctgtcctctcagccacttttgcaacgcggctgatctgctcttcagacagacctgtggtacagaccaccacgggcattcccgtcctttcacaccagctgagcatcgtatcggctgctttggcaattgaaaaatcaatcataacatcggctttaacggtacactcgtcaagtgacgtaaataccggaaaggatgtatctttattatctgcaatatctatgcctgccacaatggaaatatcttcatcattttccgcaagccctgcaattactcttcccatggctccattgcagccatgcataatcgctcttaccatcttatgcacctccgcttttccattaaagaagtccgtaatttaccagttcttttctaagtctttctttattctgcggttccatctccaccagaggtttgcggaacgggcctacttccttgcccatcatattcattgcctctttaaccggaatcggattcacttcacaaaacagggcatcgattaaaggtatggcatcgagctgcatcttcgtgctttttgccgcctcgcccttgaaataaagttcacacatgtcatgaacctggcgcggagcgatattggataatacagaaattacgcccttgccccccagggaaagaagcggaacaatctggtcatcgttgccggaatacagatcgacccatccgtccgaaagacttgctatctttgcaattgaagagaaattaccgctggcctcttttacgcccacgatattttccacatttttgcagagatccacgatggtctcagggttgatattgatcccggttcttcccggaatgttatagagcagtatcggaatcttaaccgcctctgcgacctcggtaaaatggattctaaggcccttctgcgtggatttgttataataaggggacacaagtaaaagtccgtccgcccctgcctcctccgcacactttgagagatagaccgccgttgccgtacagttggagcctgtacctgcaatgaccggaatccgtccgttaaccacatcacaggtgaatttaatctccttgatatgttcgtcatgagtcagcgtcgccgactctcctgtcgttccgcagataataatactgtccgttcctcctgctatctgctcttccacgagttcttccagcttggaataattaatttccccgctctctttaaatggcgttaccaacgctactcctgcaccttcaaaaattgacattgtgatatcctccttcaatctgtagtcagacttcctggtttatccgggattcacaggcattctctcttattcctgcgaataaataaagctggcacgtcggccagctcaaaatgtacaacaaatgatcccgtagctccccatcgtttctgatgacagtcatatgattattcatcatatgcccagaacagcacttgcagatacactgttcttcggcgtctttccctttccacggtcatctactgttcctgccacatccggccgcttactgatgatcgacgcaacctctacctcaatatatttgttcttatattatcattacttccggttcttgtcaactgtgaggtttgacaatctgtaaatacagggttccagattccctgattcaataaatgaaaaaacagtttcagatattggtatcattctcaatccttgtaaccacatcggcatgttccttcacctgcgggggacaaacctttcctgtcagtatcaggctcacgttctcttccctcagggaaagcatattcgagaaatcttccatggacatcaattccaaatccagaacccgagaaattcatctaaaatcagtaagtcacattcgcaggtggtcagtaccttcttggcaaaattaataccattctggatattaatccgctcttcctgcttctgtgattcattgagtgtgttaaagtagccgcactgcttctcaaagcggaacactttcatatcaggttccagacgcttcagccattctgatgactccgggcttaatgctccctttaagaactgaatcataattacccttttattctttgttatcgctccgatccccttgcccagagccatagacgtctttccaaccccgtcgccgcagataacctgaacaattcccttatccatatacagcacctctttaatctgtgttttaccggtaatcattatgctggcaagtctgagatgtaacgctgttacgttactttaccaggccgacttattctagcacatttttactgcatttgcaagtatctgttacagctcagccttcggccaaactgcaacaaatgatgcacagaaacggcaaaaaagtgccgtttcgcgccgcaaaactcgggattttcacaaaaagcagcgaaaacacctcgcggaatacatcatagctgaactgttataagtatcttacttattcctgctccacacactcaagcttgctgacggatacttcatacgctattctcttctcacaatctgtttcactcagttttttcgtatattccctgctctgtacacgcccccagacgcagactctgctgccaacctcaaagcctgatgcatatctggcatttcttccccatgcaatacagggtatgtagtcggattttccatacggacggttaacggccagcaggagatctgcaatttccctgccaagaggagttttcctgtaaatcggttccttgcagatatagccgtccagaaaaatctggtttgtttttgtataatccgtgaattcttccaggaaattgacctcacggacgaaaatggaaagcacaagtctgttttttgtcccctcatgacggttgtaagaacggaactggccgagagcttccatcgtacagccctgataatcctttgacacgtccagaagacgctccgaaaccatcagagggatgatgtccacctgatcactcagtctgctgacagccatgtctaccacataaaatccttctccaaatacttcatggctgaatttgaattcagaaaccacttctccaattacactcaccttgttgttttcaatcactttttctgacatagtacttctctcctctttctttccactaaatttcttttctattcttttatcttgcaatcgtcctttcagaatcacgatcagatacaattgctaatataatgtttatgcagaaaattccagtttagaagatatttcgaatcaaagatttctacagaaaaagacaatcggaggagacaaaaagggacgcccagaaaagcgtcccctgtcgtttttatttaatttatacggctcggcggcctgtcatatcaggcttttccccaatcagcctttatcttttctgctgattgcggacctctttctcattgtcggatcgaggatttttttgcggatacgcaggcttgtgggcgttacttcgagaagctcatccgtatcgataaagtccaggcactgttccaggctcatctcttttggcgtagtcagcctgagcgcttcatcggcgctggaagaacgtgtattggtcagctttttcgtcttgcagacgttcagctcaatatcctcaggcttcgcgctctgtccgataatcataccggaataaacctttacgcccggcccgataaagagggttcccctctcctgtgcattgaaaaggccgtaggtaatggattcgcctgcctcaaaggcaatcagcgagccctgcttgcggtaattaagctcgcccttaaaggggccgtatccgtcaaagctggtgttcagaataccgtttccctttgtatcggtcataaactcgccgcggtaaccaatcagccccctggacggaatggcaaattcaagtctggtatatcctccgccgatcgggctcatgccctgaagctcacccttgcggcttgtaagcttctggataacggcgccggtaaactcttccggaacatcgatataggcgatctccatcggctccagttttctgttcctctcgtcgtaatgatagagaacctccgccttgctgactgcaaattcaaagccttctcttctcatattttcaatgaggaccgacaggtgaagttcgccgcggcccgaaactttaaaacagtcgggagaatccgtttcctccacccggaggctgacgtctgtgttaagctcccggaacaatctttccctgatgtggcgggaagtgatatatttcccctcctggcctgccagagggctgtcgtttaccataaaatccatggcaatggtcggctcggatattttctggaacggaatggcctccgggtttaacggagaacagatggtgtcgccgatatggatatccgcaataccggaaatcgctacgatcgagccaatccccgcctccgtcacctccactttgttaagaccttcaaactcatacagcttgccgatcttcaccttgcggaatttgtcaggctcgtgatggttcacaatcacacattcctgattgactttgagggttccgttatccactttgccgacaccgattcttcccacgtactcattataatcaatggtgctgatcagaacctgggtctcagcctccggatctccttccggagccggaatatattcaagaatcgtctcaaaaagcgcggacatgtcctcttccggatcattgatatcctttttggcaaatccggctcttgcggatgcgtaaatgaacgggcactccaactgttcatcagatgcatccagatccataaacaattccagaatctcatccaccacatcatccggtctggcttcagggcggtctattttattgatgcagactataaccggaagatccagatccagtgcctttctcagaacaaatttcgtctgaggcatcgcgccctcatatgcgtccacaacaaggacaacgccgttaaccatcttaagaacccgctcaacctcgccgccgaaatcggcatggcccggcgtatcaatgatgttgattttcgtaccattataattgaccgcagtattttttgataaaattgtaataccgcgctcccgctcaatatcattggagtccataacacggtcacaaactacctggttctcgcggaatattccgctctgtctcagtaattgatccaccagggtagtcttgccatgatcgacgtgagcaataattgcaatgtttctgacatcttcacgtttcatattcataatctaatctatctctctttcctgtcaaacagctgctgtgttttttttacatatttttacacagttattcattttaacattaaataaagaagagttcaaggggaatccgaatgaaatttttcatataacacttacaaaatcactatttctttgccgttttccccgtaatatactttgtccagcagctctgtccggcaccggccggcagttccctccgtcagctttttcttaagtccgtccgcttctgagaccggagccaggaccgtaaccgcaaccgaatcactgtaatcgctgtcgaggattgttattttctgttctccgagaatatactggattttacccaaatcgctatagtccgtctttatcaccagtttctcggccagtattttctccaggaccacacattgattaagcccctctttcacagcctgggaataggctctgaccaggcccccggttcccagaagtgttcccccgaaataccgggttacaaccgcgcagacgttatggatttcttctcccagaagcacatccagcatcggccgccccgccgtctgggccggttcgccgtcgtcgctgcatctggttacctcattgttctctcccaccgtaaatgcagaacagttgtgtgatgcatcccagtattgtttcttcatcatcgcaataaatgccgcagcctcctcttccgattccaccggccggattgtggctataaacctggattttttttcaacggtttctccctctccgcctctatataaaactctgtacctgtctctcatcttttacctcctgctccccgtttctttccatatttaaggccgggccttaccacaaaaagatgtcctccattcataataacgtaaaaaaaatttcatgacaatagtatttatttatcaggaacaatttgctataatgatagcttataaaggaggctcctatgaactatggcagaaaatctacaaaacgaagaataaaggcagccagctcccggaagaaaaaatatacgaataaagtatttttatcattttttaaaacggtttttgtcctgtttctctttgtggccgtcacgggaatcagcaccggaatcggaatgtttaaaggcattatcgacagcgcgccggatttcaatccggacagctttgcgccaagcggctatttttccactatctataacgccaacggggaggtaaccgatactctgatcggaaccgatgccaaccgtattgaggctacctatgacgagctgccgcaggatctgatcgatgcctttgtggctattgaagattcccgtttctggcagcataacggaattgatctccgctcgataaccagggcggcggtgggcgtcctgacacataattacagcggaggcgccagcaccctgactcagcagctgattaagaacaccgtttttaacggcggtatggagacaagcgacggcgccaagattgaacgtaaaatccaggaacagtatctggccctgcagctgacgaaaaatgtggatcgtaaaataatcctgaccaattacctgaacacgattaacctgggaaagaacaccctcggagtcaaatcggcggcgctgcgctattttaataaggacgtctcagatctgacgctttccgaatgcgcggttatcgcaggaatcacaaagaatccttccaagctgaatcccgtatccggccctgatgccaatgccgagcggcgtgaggtcattcttcaggagatgtacaatcagggctacatcacaaaggaagagcaggaagaagctctggccgacgatgtctattcacgtatccagaatgtggatcttgccatcaaagaaagctccacaccgtattcttattatacggacgagctgattgagcaggtcacagacgccctgaaggaagaattcggctacaccgacacacaggcctccaatctcttgttcagcggcggccttcagattgagacaccgcaggatccggtgattcaggccattgtcgacgaggaaatcaacaaccctgagaattacgatgcggcgcgtctgtccgtggaatacaggctgtctatcacccatgcggacggtaccaccgagcatttttcacaggagacaatgagaacttatttccgacaggtcaaagggaagacaagctatgacggacttttcgacagtgaggctgagatacaggcggcaatcgacgaatataaggcatcactgctgaaggacggcgataagatcatcggagaatcctcgaatatcacgctacagccacaggcatcctttgttctgattgaacagtcaaccggttatgtcaaggccatcagcggcgggcggggcgagaaaaaagccaaccggacactgaaccgcgctacgaatacattgaaacagcccggctccacctttaaagtcataactgcatttgctcccgccatcgatacgtgcggcgccacacttgccagtgtatactacgatgcgccttatacggtgggaagcaaaacctttaaaaactggtggggcggcgattataaaggatatcattccatccgggacggtattgtttactctatgaatattatcgctctgcgctgtatggcggagacggtcacgccacagcttggtgtggagtatgcggaaaagctgggaatcacaagccttgtctcctccgacttaaacctttcaaccgccctcggcggcatcacgaagggcgtttccacgctggaactgacgaatgcatttgctgctattgcaaatcacggcacttatacgaaaccgattttctttacaaggattctggatcgcaacggaaaagtcctgatcgagaatgtacctgagacaaggcaggcattaaaggagtccactgccttccttctgactgacgcaatgaccgatgtaatgcagagtaatgtcatgtatacacggcccggcgcaggcattaatgcgaccggcagctccgccgccatccccggcatgacgacagccggaaagagcggtactacctccgataataacgatatctggttcgtgggatactctccttattatactgccggaatctggggaggctgtgacaacaatcagaagctgaaggacgaacacggttcaaggaacgggggaaccagcttcgccaaacgtatttggagaaagattatgacacgggtccatgacggcatgtccgatcctggtttcccaatgcctgacggcattgagacagcccaggtatgcaggaaatcgggcaagcttgcagtaccgggcgtgtgcagcagcgacccaagaggcaatgccgtttacaccgaatattttgccaaaggcaccgcaccgaccgaagcctgtgatcaccatgtgagagttaccgtatgcgcagtatcaggcggacggcccacggccttctgtcctcccgatcagcaggaagcgcggacctttatggcactgcctgccgatgaaggcgttacggacgattcctactatgcaatgccggattactgtacggtgcataacggctcctccacaattattgatccgtcccagacggacggaagcgatatcccatttggtcccggttatataccggagacaacggctccttattctaagccatatgaatactactcttatcccaggtcttccggagacggtaacacaattccgatagtgccggcaggtcccaacggataggtgcatgtaaaagggaggctgaaaaagcacagattctgctttttcagcctccctttctatcctccggcagcgtccctgagtgagaaaattaaagctctgtaacaaagagctattcccccataccagcagccgggacggaagagataagaaaatgttgaaaggcggccatatccgtcccgtccggatgtgtcagagccgcatggtagttatccaccataagctttgcccgtccgtcctgcggatttgcttccagcatactcctgtatcgttccagcacaccctgctgcatttttccctggcacataaatgaagcttttaatttgacggattccggaagctcacaggcagcagcctgaataatcctgtcataataggcctgatccgcaccaaagccggcagtgccgaacaaaataatctccggcggcatattatccgtcttccccagctctttaaataaactgagtataccgctgtctgcatttcctttgtcggtccaaaaccccgcatacaatatttcggcttccctgaaccgctgtgcggttgctccctcaagcggtccggccggtacttctccaaagtaaacgcactctccgccttccctttctccaagtacttcaaacgctttttcggccagctgtctggtattgccggtccggctgctgtatacaattgcatatttcattgcacatcctccttctttttatcatagatacagtgtactccccgatgctccatcatccctcccaggcattcccggttgcagcggacacagaaccggatcttatcctggttttttcctgctgttttatttggccattcgggatccgcaatcaactgacggctcattgcggcataatcaatcctggaccgtgttatctgctcctccacaaaatccgggtttgtcagccctccgaccgcgcagaccggaagggaagaatacttcttcacttcatcacagtattttaaaaagcagccctctccggaaaaataggggtgggattttggaggaatcgtatctgaaagggaggaatggtccgccagcgcaacatgataactgtcaacacccgccttctccagaagaggcaggaaaacaggcagctcctccaccagaattccggcattgccataatgcggattttcctgacgcactgccagtttgtattcgacaggcatatcgggaagagcctgtctgacggctgcaatacactcacaggcaaatttggccctgttggccgcacttgcgccgtaggagtcggttctatgattgaatacggaggaactgaagcttccgcacatcctgtccccatgaacctgaatcatgtcaaagccggcttttccggccaaaaccgccgcatctccaaaggatgcggtaatctttcctattttagattccggtatcccggtaatataagggcctgtcctctcattcatcagctcgcgcagccggtccggcgtaattctcttcatcagcattccgggcacgtagcgcagcattccttttatatcggaatccgaaacatgtagctgagcgcaggcctttgccccgtttttatgtatgacctccgtcactctgcggtaaaattcaaatccttttgtgctgtagagtgatttcgcaaaaagactgtgccttaaaaccggaacgtcaccgatcaccagcatcgccgctcccccggccgctattattcccagccgctccaaatactcctcttctgaaagtcccatcgttgtaggcgcaaatacgattctgtttttaagtttcagcccgcggattgaaaggggctcgtttattttttcatacataaatgagcctccttcgtctttcccagcttttggagaagggtaaacaactgctttttctcttcttcctgcaaggacgagagcaccttgtcatcccattcgtggaacagggaatgtgccttttcaaaagtcttttcccccttcatggtcagagtcagaatcgccatccgtttatccttttcgtggcgcctgcgctctataaagccgtcctgaagcagcttttcgacggaacgcgccgcatatccctcgtccgcccgcacagccgcagccagctccctctgggagcagcccggtttctttccgatatagatcacgaaatataaaagtccgagggaaatgccctccttctgaagctccgacttgcaaaaaagcgtgaaatcttccctgaatatggtagtatagtaagcaaatgtctgctccattctgttctcctttcaaatacttgatattatcaagtataatggattatttgataatgtcaagtatttgaaggctgaaattggaaatttaactgaggtttggaggacgcgtccggaacggaccatgtccggtgtggtgagtgggtttttctgagtcttccgtccccgtagggaagttggtcgtggaaggggaatccggccggaatgaattgctgcggggaaggagagaatgatatccggaaggacgttcatctgagagtcgatagctcttaggcagagggaggcaaagcgcgccgggcggattttggcccttcaagggcaaaatccgggacaagtgagcttcgaactcatccggagttcggagcgaatttgtccgaaaccccggagggctttgccttccactgtcttagagctatccctcgaaagggccgtccagccggatatcattctctccggctccgccctgcgaaaacgaaaccacagtatctccttctccagccagcgataccactccccgggacgaaagactcatatacacaccccaccaccccgtccgctggccgttccggcggcgtcctcacctgcttaattaaatctctaccccttcattttcggcttgaaaatcagagaagcaatataaccaaatatcaaagcacccgatattccggctgaaccggcggtaaatccgcctttaaacagcccaagtataccgtccttgccgacagcctcgctaacgcccttccacagggtattaccaaagccaagcagcgggatggtagccccggctccggcccactcggcaaacggttcatagattcctatccagccgaggactgcccctgtaactacaagcagcaccataatccgtcctggaaggagctttgtcttgtccattaatatctgtaccgcggcacaaatcaggccgcctaccagaaatgcttttatataatccatatctctatttaatcctccattccgattgtgtccgctcaggctcctatatgctcgagcattaccgcatgggcaattccgggaacattctgaccctcgttgaagctgatctgggaaagcagcgcgccggtcggcacaaaaagcactctcttccactccccgctgcgcagcttcggaagaatatagccgcataatgtcacggccgaacagccgcagccgcttccgccggagtgtgtatcctgaacagccgaatcaaagatcgtcataccgcagtccatatgaatccctttcacatcatggcctgccttatccatgaagtcaaaaagaatattttgtccgactgagccgagatctcccgtgattatcttgtcataataagtctgatccacttcataatccctgaaattctgcaaaatcgtatctactgccgccattgccattgccgctcccatgttcatggaatcccttgactgcatatccactatttttcccgccgtagccccggtcacctttgcatagatctcttcctgcgcggagggactctccttcccatcctttcccacgataacagaaccgcagcctgttaccgtccaggtcgtcgaaagcggtctctgattgccgtatgccaacggaaaacggaactggcgttccgcagaagcaaagtggcttgacgccagagccatcacacggtccgcataacctgcgtttaccgtcatggaagccagcatgattgcctctcccatggttgagcaggcaccgtacagaccgaacaccggtatctccaaatcctgcacgccgaaagaagtagccacgatctgtcccagaagatctcctgcaaacagataccggatatcgctttccttaagccctgatttttccaggcatttgagagccgtctgtctctggaactcgctctcggccgcctcccagctatcctgtccgtacatcggatccggctccaccctgtcgaaacaggatttaagcgggccttcgccttctttttcaccgacgatcgatgccgctcccataatcaccggttccttatcaaattttatgctcgcttttcctttctgcatctcacctgctccttccttttactgattcagcccgaaaccgaatatcacactgataacaccgagcgcccaggacaccagaaccccgtagaggataaccggcccggcgattgtgaatatcttgcagcccacaccaaaaacctggccttccgctttgtactcaatggcgggggcagccacagagttggcaaaaccggttatgggtacaagtaccccggctccggcgaagcatgcaattttctgaaatatgttaagtcctgtcagaacaacacttaaaagaatcaggattaacagcgtccatgctgcagccgcatccttttcaagccctccctctttaaaaagattcagcagaatctgaccgatcatgcagattagccctccggttaaaaaggccgccaaaacatttttaaaggtactgtgtaccggtgtcttttgctttacatactcgccatattgttttttatctatttccatctgctatgcgcctcctgtctttcttcaaaatctctaacttactaaaatgtgcagcatcagcttcccatgcctcccagaaagtagaccaggcagccgaataattttccgagggcaacggataaaatcacatactggagccccacggcaagccggatccttctgctgataaccgggagagccttcagtgtttccgccagggacatgacaagacagccgacaaagatgccgctgcaaagtccgaaaatccccagcacaagatggcccagaatcggtatccccagacctctggcgccaaacagcatcggaaattcaaaaatatccagcacgtttccgaaaattccgccgataatgataacggtctcgtaaagaataatatgacggcttgtccccgtttttccaatcacccggggaaagacccctatgatggccaaaaaagcaaaaacgccggccgctatgacgccgccggcacataatccgataaaaaccagaagagactgtctaagaaacatctacgccagactcctttcttccgtcattctgaatcagggttttattgatattatcttcatataaacgcatttccacttcaagcggtgtcggatccgtattcagcttgagctttgcaaaatggttaaagaatacgataattcccagcgcaaggccgactgagtaggaggtttccagtatggtcagtccatccgactcctgtcccatgataagacggtaaagctccttaaatacatccagtacgctggcatcgttgttaaaagtcataattgcaaatgccgcgcctgaaaaacacaccaggcagacaaaaatagttttcagccactgccaggtgtacattggctttttagatggctgataatcaatgataaaatctgtttctcctacactgttgacttccgcttccggaacattttcagaaattttctgaacaacgtccacaatgctgcccatataccgtttttcctgatccgaatggattgtctgcactttcaccgctttgcagcggctggccgtgcttttgtcactgcagtaaacatctgcaatgtcactcaggaatacatcttttttatggacctgggtaatctggcttagttttacatatactgtctgtgtcatgctgccatctccatttcttccctgatttccaggtttctgacgaaggtgccgtcaacatgggatgagttacggcccacggtcagaagacagtaccatactacggccacgatagccgccatacagcagagcagtatgattaatcctgttttttttcgcagattcatgtcacttcacatccttttcctctgaactgtttagggatagtatggtgcaaagacggatttttattctctgtaaaaataatttaatatgaagatcggaaacagggaggcggcccctgtctttgccgtctccctgttttaccttcctatgaaaccatacctacagtttttcacgcatctcacgcagtattttccgttccattctggacacctgcacctgggagattccaaggatctccgctatctgggtctgggtctgattataaaaataccgtcggactatgatttccctctgctttttctccagtgatttcagaagctctcccagaaccatgcggtccagaagcatttcattttcttctttttcttccgccaccttgtcgatgagggacaaggtattatcctctcccgaaccggaaggcgcatagagtgattcaacctggcagccggcttcaagggatgccgccacctcctctttactgacctctaaagcttctgaaatctcctccagcgtaggctcgcgtcccagggaacccgacaggctctcacggaccgcgcttaccttaaagcccagttctttaatggaacggcttaccttgatcattccatcatccctgagaaacctcttgatttctcccgtgatcatgggaactgcataggtggaaaaccgtacgtcataggaagtatcaaatttgtcgattgccttgattagaccgatacttccaatttgaaacaaatcttctgtctcacatcctcttcccgtaaaacgtctgacaatactccagacaagtcctacgttgtccattaccagcctttctctggctgctttatccccgctgtgagccatctcgatcagtttcatggtctcatccatagagtcacctgccgattttctttttcatttttaccatagttccccggcctggctctgattccacctccacctgatccatgaacgcctccataaaagagaatcccataccggaacgctccccggaggtatcgctggtatacatgggctccatcgcaatcctgatatcttcaattcctttcccttcgtccctgatccatacggaaagctcatcttcctcaataccggcttctatgtaaataattccttccccgttcccatatccgtgtatgacacagttggttaccgcctctgaaactgcggtttttacatcgttaatttcttcgagggtcggatccatgcggctcatgaatacggctaccgtaaccctggcaaactcctcattttccgaccggctctcaatctgcattttcatccattcttttctgggcatttttccggctccctgttcttttatatccatatttaattgaatttcctgcatggtctgtcccgccttcacactattctcctctctttccttatccatagattgcctcttcccttgtatcacactttttgacaagtctcattatccctcctatcgtcaggattctcgtgattctcggacctgcgccgtaaatgcggaccgttccccggctgccctccatctgtttgtaccggctcagcaagactccgattccggaactgtccataaattccgtgtttgaaaaatcaaaaacaattttgttgatataattttcttccatcagaagatccgtttcatatttcagattacggcagttatgatgatccagttccttcggcagatggatgattagagcctgtccgtctgcctcataggtaaaaagttcattctgcatttttatatgctcctttcgatatttcaataataagctgctgctttaaattcaatgaaaaaagaagacactacgggtatcatcatttatcttccgtagtgtcttctatcatgttgctgctttgcgccctttgccgtttattctccggctgcgctgctttcttccggagcgctgctttcaccggccggagcctgcgtctcatctgcagccggctgggtttcacctgtatccgcacccgctgtgccggtccccgcagtaccggttcccgcagtgccgccgttacccgaatccgcctgcgacggctctgttcccggtggattttgatttcccatcgactgccccggcgcaccggccgcctcgctctgcggcgccagctccgccaactggcttctcgccctgtcggcatattccgaatcggcaaactgggtgacgacctgggtgaaaagctgaacggccgtatctgtctgtccctgggagcggttaatcatcgccatattaaagataaccttagggttatccggcctgatgctcagacaggtctgatagtagctcaacgcctcgctcagtcttcctgcggaccacatcgtataagccaggtcctccagagtctggtatccgttagtctctatatcctgcttcaccgcattggcaatggcaagatctttttcatccgtaaacagggccggattaaaaccggcataaagggataccgcttccgtcaggttattatttctgtacgcctgcaatatttttaccagaatactgtactggtttaccacgctttcattgctgtttaaaaagttgtttaactgctcttccgccgaatccttatcgcttttataagtctcaatgctgttgttcaggctggagatttcctcatttttctgattgagctgctcattatactggagtatctcctggttgtgttcgttatttaatttcttcgtcgcggccggcatgacaaggaaaaagataaccgccgcgcccaaaaggagtcccgcaccgatattgagcacggactgccacccggtattctctttgtagctgggcggaataatgacatcgtcatcctgcatctgcctgtgggagaatgcatttttaatctttctgcgctcaatctcagcctttcccgtcctggccttgacaatcgacatataccaggatgccttgggattatttttatctatttttaatactttatagagagattttcccgccttggtatagtcttcgtgactgatatacagcagcgccagcagcaaatgcgccttaatgaacttcggattggcttccaccacacgtgtaagctgcaggaccgccagatcgtcgcttccgctctgagcctgctggagagccagattatactttttcacattctggctgaccacctcgaggcgttccggttttctctgtatctgctccagataatgatccgccctgttgtcattctcctggaaattcatgctgataacccactgtacaagcgcctccgagatctctcccatctcataatatataaggcccagcagatttctcgcttctatatggtatttattcaggttcaggcacttttgcagatactgtaccgcacctgtcaaatctcgtattctcgccagttccagcccggtattgtaaaagctgttggaaaccaggcggattcttttcatctgatccattcttaccgcctattctttcattctctttaaaagttcaatcatgatgtcggacatatccgtcaaatcactttttacaatcgcctcgccgatatcttccacctcaaggcttggtttaaaccgctctatttcactgtcaaaatcaattgccaatacttcttcgctcatgctttattcctcctcagcacatcctttatctctccgatcaaatagagagaacctgcgcagaaaaccgtatcctctgcttttttctcattaacagcctcttttaatgcttcctccaccgttttaatcacccggatatcgtggccgcttccattgtcccttgttccggcccggccgtctacagcgttccaggcatcgtgggcggcctgattaagttcattaatcgccagtccccgtccatattctatctgtgtcagaatcagcacatccggcataaattccctgcagagaatctccgccatctcacggtattccttatctgaaaccacggcaaacacaaggattttcctgccgccgtgcctggcggcaatcgtcctggccgcttttgcaaattcacggattccgccctcattgtgggcgccgtccagatagacgtccttcatgatctgctccatccgtccgggccatacggcctgtccgatacctctgcagattacatcttcgccgattcccataagctcagcagtgcggaatgccagcatagagttcaccgcctgatattcggcggcaaacgggatatcgatacggtattctctgtccccatccttattctttgccaaaagctttaagtgatcgccgtcaagctccagtccgctgtaggacgtattgtccaccggccaggccctgctgcccatctcttccgctttcgccctgatgacggatgacgcctcggccgatgtattatcgaatattacgggtacgccggctttgataataccggccttctctcctgcaatcttagatactgtgtcacccaggtattccatatgatccaggctgacagacgtaatcacggccgccaggggatgctccacacaatttgtcgcgtccagacgcccgccgagtcctgtctccaaaattacataatcgcagggtgattcttttaccataaccataaacattaaaaataaaaactcaaagtaggagggatggcccgcccctatttctccgaatgcttcgagcgcgtcacaaaccttccggaatgcaaacaaaaataattcatcctccacatcacgtccgttaaaagcaaacctttcccggatcgaaagcaggtggggggatgtaaatacagcaaagctatgtccggactccctgagaatggatgacagaaatgcacagacagagccttttccattggtacctgcaatatgcacgattttcatatcctcctgagaaattcccagaattttcagcatttccctgacagtttccacagtatgcttctctttagaaaacttcggtatctgatccagatattctgctgcttcattcacagctgcgttctgttctttcatcatatcttccatctttctgcctgaaggcctttatctgtaaacggcagtaaccgttcaagctgtcaaaactttgacaatcggtaataccgcttcatgtataaaataatggttttactttactattataatatacatcaggtattatgcaaggagtttatttcggtattttttctgatatatcgacacgttactgttcatatggcaatgtcatttagttaacagtgcaataaagggagatttagttaagcaggtgaggacgccgccggtacggccagcggacggggtggtggggtgtgtatatgagtctttcgtcccgggggtttggcatcgctggatggagaaggagatactgtggttttgttttcgcagggcggagccggagagaatgatatccggctggactgcttcttcgagggatagctctaagacagaggaaggcatagcccccggggttacggacaaattcgctccgaactccgaatgagttcgaagctcaagttgtcccggattttgcccttgtagggctaaaatccgcccggcgcgttttgtctccctctgcctaagagctatcatctctcgggcgaacgtccttccggatatcattctctccttctccgccggaaaatgtcggcagtatctccttctcccggaaggttttcgccggaacgaaagactccgccgggtgtatcggccccgtccactggcctgcggctgctgattgtctcacgcgttaagtgcggggacggaccttgtcgcggccacgcagtgctaccgtgtacgggaaatacgatatgccttccatgcgcctttttaaagaattgtggaagattagataccggcctgccggaaacacgtagtggccgcgacaaggctctccccatttaaggttggagacaatcagcggccggagcggaccatgtccggtgtgcgaaaaccttcgcctgagtcttccgtccccggcgataacctggaccagggaagtaggtggaatcaattgcggaggggacatgggagtccgccggtgcttagcgaggtccctcacgagcttagcaccgatgcgcactccaaagagtgcaaacggtccccgcagcaattcattccggccggattcccccctcacgacaaccttcaaccggggatggaagactcagccatccccctcaccacaccggacatggtccgttccggacgcgtcctccgggcctcagttaaatctccaatttattgcactgttaactaaatgacattggttcatatggttttctcccacgaggtgttttcgtgcgctttctgcacaaaaatcccgagttatacggaggcgctgcgggcctgtctgagccggttaaagaaaagaccgggcagactttttttcccatctgcctggtcttctttttctgttgaaggcgatgacctgtgcgcggagcgtgcaggttatcgttattatatgatacggggcggccgacggcctgttttcccctaccggttcgtaaatatgtccactaccgcatggaagatctttgttaataccctccacattcttgtgaacggaccaacctcctcatcctccgcatcctccatatcggagatatcggtggcctcgtcatcgtcactgatttcatccgtccggagtataatctgcaggctgtggggcgaaggatttttcgatgaagtaaaggaaattttgtctgcctccggatcaatattgaggaaattattttcatcctcgtatttatccaattgctcatccagcgtatccttcatgccctcgctggccgttctcaccgccgtgatactgtcgagcgtggtcagactcttatcgagcagcccacgaaggccctccaggctgttcttcgtacctgcatcaagggaatcacctgctgctatcatggtcgtgtttacaaggctcagcatgtcatgtgtgctgcccattgccctggtcaggcggttcataagttcctgtgtgtccgccagtgaatccagcatggagggaacataactgtctgccgtgtcaattagtactctcgtatcgtcaagaagattgatcaattcatcggtcacgcttctgagcgctgagactgtggaggctgttttgtgtccaacattcccaacatcactgcatacggcgttgatttttccaattacctgagccgcggactgctgcacagcggtgccgtccccgatcatggcctgaattttctggagaatagcgcccacttccgccggataggaggttccggacagtgactggagtacttcctccacattgtcggcatatgggtccagttcctcactccattcgtcaaaactctcattgttcactccaccgcttcccggaaggccggaaggtccgccttgcagggcgctcaaatccgactcagcgccgaatgcctgaatctgcgcttccccgtcactcttctgtgcctgtggggcgctttccgtatccgtatctttcgatggcaaagattttccggcattttccggtgtttccggaacggatgcattctccatttctgccgtttttccggctccttctgcggtttccgttcctgccggattttccgttcctgctgtgctttccgttcctgacgtgctttccgttcctgctgtgctttccgttcctgacgtactttccgttcctgacgtgctttctgttcctgacggattttcagcgcctgttggtttttttgtctcttctggttttgtttcttctggttttgtctcttctggtttacccgtgttatcactgccgggagccgtattttctgctcccacagaaccggctggttttttctttctgttatatcggaaggaatcagccgacttaaggctctcctccagcctttccagatcgtcggatgccagtccgtaagcgcctgaacttcctccgagctggcctgccaaagcctccagaatctgctgtatctccgctgtctgctgactgatcgcagccgccagctgcttctgctcttcctctgtgattcccttaccgattctgtccgacatcgtgttcagggaattcttcagtcctcccagcctgtcatacagccgatccagctcatcctgggtatcctccattgtgttgtagatagcatccatattggcattgatatccgtcaccgcgtttctggctgtttccaggtatggaatgaccctggaggtctgttcggtaactgaggccagatcattcagggcctgggttgacagagcttctatctgcttcctgttcccatttatctgccctctggcgtcatcaagggaattcaagcctcccttcacctgtgttacatccattttcatggcttccattgagcgcagaagctggttcatgctgtcgtacattctatcgccgtcctcgcgccaggtatccttcgcctcttttaaatccttaatattatttaacgcatccattgtgccgggcaccatcatcatgataatccccacactctcataatcatcggtgccgatacgcactgtatagtccccgtcttcacccggaagggcggcaaacataaccacggtattatttcccaccgactggagctgggagccaggggcgtccacactgtaacatttttccatatccaccgggactactacggtcagtatcatattattcttgtaataagccctggccgccttgttggcaaatgccttgacattaatttccacaagaccggatgcgccggacagctttgacgcgtcggcctccaccccattcagcttatatgaaatatcaaatgtccacggaagctctgtcgtgccgtccggcatcgtacactggtaataaaaccgtttgctgccctccggaagctgccaggtaacgcttccgtcacccagttcgggttctgtcttatctgtcatattgactaccttgtcatagactccgtaatctgtataacgctccacgccgttggtactgcatcctttcactacgttgaccgttgtcatgtttccgtaatagtccatattgacatacatcgtttcgtcgacctgaacgcggggagccgccgccctgacaggcgatgccacactcatggacagcgtgactgccgccattaatactgctgtttttcttctatgtctcatgaccttcaagcctccttcttatcctcgccgctgccgttttttccgggtttcacttttcccgccattcttctgaaccgttcccgccttctcattctccgcttctcaaagaatttccggatccgttcaaactcattatccatcaggatattgtcgaacagcacgagaaaggccggcagcagggtgcataccagaagcatgctcatccacgctcctcttcctatcagatgtcccagatctccgatggcggccaccgaagaaatgttgtataaaatataaccaactatagtcaggattgagccggatgtaaggatagccggaatgctcatgttaagagcctggatagctgcctccctcttttccgcctgtttcctgcattccagataattgttcgtggtcagaatcgcgtaatctaccgtggctccgagctgaatacagcttacgatgatatatcccatgaaaatcatcgtatctcccttaatatagggaactgccatattaataaaaatcgccacctcgatggggatcatgatgatcaccggtatagccaccgatttgaaactgaacatcactacaaagaagacgcctaacagcgacagaacattcactctgctgtaatcctttgtgattgtcgtctcaatatcctgggtggaaggtgtcgttcccacgaggtaggaattttccggataatattttttcatcaatgcctgaatctcatcggaacactgataggccagcttgctctcgcccttgcttctgacgtaaatcaggattctggaatagtcattcttatgtagctgctccgtaatgctttttggaagaaattcctcaggcacaccatccggaagagagccggccatcgaggttacggattttgtatacgcaagcgcttccacttcgtcggtaaaagctttttcatctatcagcgaagtgttcggcaccagggccatcatcatattgctgcggccgaatttggcattgatcagctgctcgtcgtcgtaaacctttgttccctcactggctcccaccgcatcattaccgaacagaaaacgattcatattctgcgccgtataagccggtatcacgaatattgcgacaaaaatcagcacgccgtaccggatacggtaaatcccgcggctgagcttatcaaatcccggcataaatgaacggtgtcccgttttttcaatcatcggcgtcagcctcagtatcatggccggcatgaagaataccaccgtcagcaggctgaagattatgccttttgccagtacgattcccatgtcaaatccgatattaaatttcataaaggccaaaactatgaatcccacgatcgttgtaaggctgctggcgaaaatggaattcagcgcttcattgatagcattcgtcagagccgtcatctgatccagacctttatttttttccctggtaaacgcatgaatcaggaaaatggagtaatccatcgataccgcaagctgaaggacggccgacacgctgttggtcaggaatgagatttcccccaggaaaatgttggttcctttgttgatcagtatcgccactcccatgacaatcagatacaaaaccggttcaaaccaggagtttgtcgtcaggcagagaataataaagatcatcagtacgccaagagtaagtatcagcttcatctctttcgtcacattctcggccagcgatttattctgcaccgccatgcccacataatggcccttttccccggtgatttcctgcatcgcatcaatcgccctggaggttttccggctggtgtcgcctttttcaaagacgatatccatgacggcagaaccgtctttatagtaatcatcaatactgttgaagttgataaatgcgtcggaagaaaagacatccgttccggtatccagccacatgatctgatccacaccgtcaaccttttccagcttatccttatactgcttagcttcatacagtgttacatcttcaatcataacccgtccggtacccggatagccgaatttctcttccatcagatccagtccggctttagactgtaccgtgtccggaagataccgtgtgagatcataattgatattgacaaagggagccgccagcattgaaagaagcacggctatcacaaatacaatctcaatggcccggcttctctctatgatgaatacaggaagagaaaaggaaccctttttttcttcaagctgttttcttttatcacgcaaaaatttcagtctcatgtttccctgctcctgtctgtttcctgctgcattcacggccctgctgaaaattcagcgccgtataaatggcagccgttacctcataaaaatcaccatataataatcttttccattgaccttttcatgggcaagccccatctctttataataaaccgcacgatcggaacgcttcttttcatcactgttatggtttctcaacagcttatcctcagccgcatccgctccgtcgcagttcatcagatagacttccataatgcgtctgccgctgttatagccgattgctttcaaatactcgctcagtgtgccctcatccggtatttttccgctgccgtagccctttgtcctggccatttgaagacgatgctccgcaatctcctgcagcctgccgtttatgacatagcttgcatccttgtcataattctttttatcgtcctcgtaataatcgtcttcctcgtcaccgtcaaacgaatcctctttcagttcattcagattgtcggcaagtgcctgaagctccgtattataaaagccgaccggaaaagctccgccgcctgtgtttttctcgcgcctggcactcgcaaagctgccatccgcattgaacgtatactgggtttcatctttcctcagagtactgttctgcattgtgccgttatcgcggaaataatagtgtttgccgtccacctttttccatccggtggccataatgcccgattcatccagataataccaggcatcgccctcacggaaccagcccgtctgcctgttcccgtcctctccaatcctgtaccagtttccgtctgcctccagccagcccggcgcggccgccgtaccgctctcagttatgtatttccatcttccttcattatcctgctgccagcttccgctgtctgccattgcaggcactgtcattccaagtgtaagtgccagacagagtgccgctcccggaaacaatcttaatttcttcatttttcctgaatccatctttttatctctatataagttattctcattattcatctggtttccactctttcttcatcaatatggggcagggccgtgaatagtaaccccggcccaagtgcctctgcaagccgtcagccctgtggtgtagaaaatttattttcttcccattcggcttttctctcttccgacactgcccggatcattgccgccacttctctgtccgtaaaatggctgctgtcgatcatcaggtcgtagctgcttctgtccccccactttttcttagcgtaatagttataataatttcttctgattttatcggcctgacggacaagataaagagcctcctccccgtctgtctcataccgccttctgatttcctcaaccctggcctccagaggcgcatagataaatacggatatcagtccctcctgcttctccaaaaccttatcggcacatctgcctacaatgacgcaggagcctgcatctgcatattttctaatcagttcagactgaatagcaaaaagtgtatcattcatcggttttccatatcctgtatattgatttgacttcgcaggaactttaaaaagaaaacggttggccttcatctcgtcagcctcttccagttcttttgtctcaaaaccgctgcagcaggccgcctcttcaattaaatgcctgtcataacacggaacctccagctcctttgctaaaagctcaccaattcgcctgcctccgctgccaaattcccttcctatggaaataatgatttttttcatctttattcctcctaaacaacattcaatatgttaattgacatttgtttatttataagctataatgcattatactaactcatggagatttatacaataatcattttttcattcccaatctaataaacaacacttttgtcttatatgttcattaacaataatttttgtgcaaaatagacaaaaagggacaattgttaaattcccgttaagaaacatttttaaaaaggagaaacgtcatgaaagaagagaaaaaagaagaaactattgaccggcggatcaggaaaacacgccggctcttaagagaatgcctgaccgcccttctgaaggaaaaaaaggttcaggatattacggtaagggaaattgccgatatggcagacatcaatcgtggaaccttttacctgcattataaagatgtctttgacttgatggaacagattgagaatgagttgttaaaagaactggaagatatgctgaaccaccaccaggctcaggatttgttatcccggccttccctgatatttgccgagctatatccccttgtgcaggataatgccgacattgtctcgattctgataggcgaaaacggcgacttgaattttgtcaaccgtttaaagcacatcgtgcgtgaaaaatgtctgaaagactggatggcgctgaaaccgctgcgtaattcgaacgcttttgaagcttactatgcttttattgtttccggatgtattggaatggttcagtactggttaagttccggaatgaaggaaagtgcggaggagcttgcttatatgacggagaatattatattaaatgggatacgggtgctggagaaggaggcaaaatagatttaacgatatcctgtacgctccgcgcacaggtcaccgccttcaattaaacagatggggccgccggggctcggccccgtccaccggcctgcggccgctgattgttaaccctggaacggaagacacagtcaaccgttctcatcacaccgtctccggtccgttccggacgcgttctccattctcaactcccgcctcatatggatccgaaacaattttatccccttccgacagcccgtcaagaatttccgttctcccgttttccgtccgtcccgctttaacggcaaccgcttctgctttcccattcttatctctgtaaacgattgctctttttccatccggaacaattgcggagacgggaactgtcagcacatccttcgctttgattatccggaaggtgacatccgcctgctgtccggcaccgaacccggtattaaaaatacccggttccactccttgcattgcctcttcccatggttccagctccacctggcagcggctttcttcaagtcctgtggaggacagctccttcgacgccgtcctggcgacaaaggtcacctgcacctggccttttgtcccgtcgggatacactgcctctgccacagttccgggtacaatgcccgagacgtcttctgcaagcacagaggccgacagcttcatcccatcatcacggtaaatcttgacagccgcctgattctgagccagaaacgctcccctttccgtatagacttcccataatatgccatcgtaaggcatgcggatttccgcgcctccgaccgcctcattcagtgtattaagctgcctttcgcaggaagcgatctgttctatcatataatctctctgacgttcggaatttatctcctctgcctgaagatactgctgatgcgcctgtaccatctccagctcaagcatctccagctctgtccgggagagatagccgtcatccgccaggaccttaccggcctcgtagtttttctttgataaacggtaacttcgatctgccgcttcgtaagaggacgctgcttctccgtttgtaccgtatagccggtcatattcctgcttagccaaacttaactgctgctttagctgctctttttggatatccgtactgatttccagtaccgtctctgtccttaggaggacttctcccgcccttacctggcttcccggtttaaaagggacatccgacacactccctgctgccggggcgcttaatatcatactgtgaacaggcgtcaactctgcctggacggtaaagctcttttccaggttcccatatctgaccacttccattttagccgtgaccggcttaaacagcgaaatcccaaatacagcgaggcagataaccacaatcaatgccgccagtatttttttgtatttctttttcatatagccgccctccatttattcttcgctgcagcttcgccgtcctctattcgcgctccctcagaaattctgccgggagtatttttttaagcttccggtgcagtgccgcggaacccagaagcgcggagcatgcggtgaggcctgccgcagcgagcagcgcatttgcatccagcactttgggaattgtgtacatgtcgcaggacattgtggctgatatcaggcggctggccagatatgacagcgggattccaagaatgacagagcccgccgccagtacccattgtcctgccgacaatacatccaggcattctttgctgtttaaccccaggagcatgagaacggaaagctcccgtttcagctcctcataccggatcagagagctgacataaatcaccgcaaatccaattgccagtcccatcagagacatggaaaacataatcccgctcatactgttcatgacggcccggtactgggaggccctctcctgcctgctctgaatcagggagacagctccttttccctgcagttgctgccgaaggtttttaagaacaccgcgggaggcttttaggtaaacgccggtaaaaccgtctttataagcgctcacggccgccgccccctgataagatgcgtaggcatagctgcccatatactgcgctataatatcagtgacaactgcttctgtctctttcttttccgggtaagcagtgcgtatctctacggaacctccccgtttgactcccagctttcctgccatatgttccgaaaggacgattccttcttcttttacttttacacgctgtccgtccggacggtacagatgaatcagctccgtatccatatcaattccctggagggtacagtcaacttttccctgcgggcctgccagtgtaaccggaaactcaatgattccctcagaaatcaggattccgggatcccggaccgcttccaacgcgtcgagacggctgaccggatggctgaaatataccataatgtcctgcttttgtgtcttttcccagtaatcaatgataaaaacatcaaacaacgcattcatcgatacgagagtcgccgtaatcatatacgcggctgccatacccgccagggaaaaacaggttctcctgggatttctggccagacttctgagtcccatcagtcccggtattgtaagtatctttacaacaccgggaattttttccagaaaagaatttctcacagcgccgggggcagccggacgcagcgccctggcaggctccgtcttccacatggagcctgcgctaatccatgagacagacgcgcaaaagacggcagcgccaaatgttcccgtcagcatatatgcggccgacagaggcgctgtgacggacggcagcttgaaatacacccggtaataatctgccatcggatccgccagtatatatccgagcgccgttccgagaatgcctcctgccgcgccgataacggctccatataaaaggtagtggaaccgaatctgccatttcgaaattcccagggccatcatcgtaccgatctgtgtcctctgctgctccgtcatacggctcagtgtaatatataaaacgacagccgccaccgaaagaaagaggaggggaatcacgccggacattttttcaagctgtttgatttcctcaccgaccatggcggcgccggtctgatccgctccctcataaaccgaaatcagtccgtaggcctccagaagctgttccaccgcatcttccacacgctcccattccactccgctttccaagcgtatcagaaagctgttcgccctgtattccttccccagaagccgggcaatggtccggtaggaggcaaatgcagcatcataagtctccgggcttggtaacaattcattcctgtcgcggatcatatagatattttcaggtgttgtgccgattccggttatcttcatcgggaccttttttccagcaaccacaatcttaatggtgtctcccggtttcaggcctctggcattcgccatgctttcccccagtatcagctcctgctttccctccccaggcatcattcctcttgtgagcaggggccggttcatctggccctccgaccacgagacaaggtgcagctcagcctcgccctccacatcggccaattccacattctgcacgagacgcccttctgcagcggaaactccgtccagcccttccagcctggacgccgcccggagatccgtatctgccgtatctgcaaaaccgtcacagtaatccgtattcctgaaaaatgtatccctggacagcaccatgttatcatagcaaagtcccagaacactgtatccgcacagaccgattgctacaatcaggatacaaagtatgtaggcagacagggaggtccggatatcacggagcatttttttgaataaaataactgccatatccgtccctccctcttaaaccgcccggctccgccaggccgcctgttcctgcccgcaccgccggcataaaaagacggcgcttaccagtccagttcctccgccgtgcatggcgcttcattgtcctctattcgtaccagttctccgtctttcatatgaaatatacggtcagccacacgggccatctcgggattatgcgtgattgtcatcacaggacagttaagccgcttcctgacgtctaaaagcagctttacaaccgcaatgctgtttttactgtccagagcgcccgtcggctcatcgcagagaagcaaatccggtcttttgacaaccgcccttgcaacagaaatacgctgctgttccccaccggaaagctgagacggaaagtgacctgcccgctcctccagaccgaccatggcgagcgcctcatccgccttcatcgcacttttcacaagtgacgccgccagttccacattctccctggccgtaagcgacggaatcagattaaagaactgaaatacaaagccgaccacataacgccggtaaagcgcaagctgatccagcgtcttatccatcacattctgattaccgtaccacatcgctccggaggttgggcggtccatacctccgactatattcagaagtgtggatttaccggaaccggaaggccccagcaccacgataaattctccgcgcctgatttgaaaggaaacatttttcagggcgttcacgattacatcccccgtctcgtaacgcatggagagcttttcggcattcagaatcacttccccgcacggttcaccatcactgctattcttttttataagcaatctgcttaaaccacctttcccatatgtaaaagtttcgcatcatatcctccaaacaagcggctttccccttctctgactgtcatggatatacacatcggtaatccatgtgggcaattcttcattagaccgttagggaaattgactaaatcgttacagttcagccttcggctaaaaaaacagcgaaaacacttcgcggaatacatcatggctgaactgttacactaaatcagtcaatttaattgtatcgcattgactgatttttacaaggggaaggagaaattttctcagatatgtctctgcatgatgagcgtctgctaagttactgttcacacggttgtgtcatttagttaagcaggtgaggacgccgccgctggtctgcggccgctgattgtctcacgcgttaagtgcggagggcggaccttgtccggtgtgcgaaaacctccgcctgagtcttccccctcaccacaccgctttctggcgacgcgtgaacagtaacgctgctcatactgcggacacccggacggatagttcacatattgaaaaatggcctgttctaagttataataaatgggcggcagaaaatgatgccgccgaaggcggtaacctgttcgcagagcgttcaggttatcgttatctgaagataacattaccttaaatgcagcatattcaaatgaacagggaagggaatctgactatgataagtgattacaggaacaaatttgttactccggaaatagctgccgccaaggcagtccaatccggtgactgggtggactacggttttggcgccggctttccggagctgatggacaaggcgcttgcagggcgcaaaggggaattgaaagatgtgaaaatccgcggcggcctggtaatccgccccgaattgaagtcgtggaatgcgaccctgagcagtcctctttttcatattacagctggcatatcggggactatgagaggaagctgcaaagccgtggattatgccagtttatcccgatgattctccgttcactgccggagctttaccgtaagcatatccgcgtcgatgtggcttttgttccggtatcgaccccgatgacaatggctactgcggcctgggtatctccaattatgcatggagaactattttcgaaaatgctcgtaccgttgtgtttgaaattaatgagcatctgccgaaacttcacggggtggacggctcccaccgggtgcatttgtcggaggctgactttattgtggagggcgaacacgaaccgcttcctctgcgcacttaccgggaaccctcccctattgatgtggaaatcgccagacatgtggtaaaggagattcccgacggcgcagtcttgtccctcggcgtgggcggtgttcctttcacagttgcaaagatgctggcagaatcggatcttaaagatctcggctgccatacggggaccatcagcgacgcgtttctggcgctctatagagccgggaagctgacgaacagactgaaagaaattgatacaggatattctacctggaaccttgccatgggttcacaggagctttataactggcttgatgaggaaccgatgctcttccgcccggctgatgtggattacgtccactctcctgagcgtatcagcaggatgaaacgggtaatcagtatcaacggcggtgtggaactggatctgatgggccaggagaatgcggaatcagcgggcagccgccagctctccggcacaggcggacagctcgatttcctggagggagccttccgctctgagggcgggaagggctttatctgccttgcttccacgcataaaaagaaggatggaacacttaaatcgaatattgtgccgtttgttccgggcggcagcgtggtatcggctccacggagtatgattcagtatgtggcaacggaatttggggttgcgaagctgtcgggactgtctttacgggaacgggcagaggcgatgatatcgattgcgcatccggatttccgggaggagcttgggaggtatgcgcgggagaattttggatagataggagggagggaaaagtgaagattttgtaggataaataatatgatttattttgtaggaaattctcccccggctttgaagtttaattgatgtttgctctgaagccggtgggagctttaggttacatatctgtctgagccgcatgattctcagataatcactggttctcactttttgattattccgttaaaaagatgggtaataggcgctggctttgagcctgactgtacccatatcggttgcactggcggcaaaaaccatggactttttttacattgttttttgaacgactatataatcggtaatagttttgcgttgcttttttgtagatcagtatctaaaactacaaataatatcccggcttacatactaaacagtctttctctgcatcgtaacataacccttttttagcgcattattctgatattcacgtatggcagtataaccattgattcccagcaactccagccctctgtgtgctgctcctatatcatatcctccgtctaagccaatttcctgatactcgcagggctgtcctttcataatattcaggataatatcactttcccgttgcttcgccggataacagtcgactccagtaataatgccgtgcctggtatccactgtcatctaggttagataccccagtccccttttctgtgcctgatggatattttatagtggaacgatcaattagctcaactgtttcgtaacggctgttccatgatacattggatggaagaaacgaaccatctgcaacacttgtttccccagatacgctcccaagctgaatgcacttcaaaacaatctcattaaaaatttcccgaaatatactggcatctttgaaactccgtcttctattttggctaaaagtcgaatgcttcagtactctatgtatgagatcaagcccacaaaaccagcggtaggcaaggttaagcgacacttcctcttcaagccttcgttctgatttgattccataaagataactaatgagcagcatttttatcaggataaccagagcaatctttcacatactcatttcataattttcagtagtgtagtgaatgatctgagaaccttcgttttcaaattcaaagggtacatttagaagtctacttaatctagaaataacatgtttcttcttatcaggctctacataaaacaaaagaaaacctcctcctccggcacctagtagtttccccccaatgcccctgctgctattccttccctatatagataatcaatatcatttgttgttattttatttcccgtctgacgcttcaaattccagttataatctaataactttccaaattcctttaagtcagtatatttatcaactaaaattctttcagcttcatccactaatgtaaacatttccattatttgcttttttttaccgtttaagcttcgctctgtatcttgttgtatctccgcagaaaaacgagaaaatccggtaaaaaataaaaccagactatcatttaacagacgttttctatctttagaaatcacaaccggtctaatcttaaatccttcatttgaaaattcgatccgattcatccctccataagccgcagcaatttgatcctgccagccacctgcctcatgacaaagttctcgttctaaatagatggccgaggatgccaatctttttttatctgcatactttccctttaaggcatagaacgcatttagcattccaactgcaaaagagctactagtccccaacccagatctggccggtagatctgcctcatatgtcagccgtatttctctcatatcaagatagttcatagcctcacgaatagcagggtgttgtatttcacttacatgctgtaccctttcaacttttgaataagacagctctgttgtatagtcaaaaaagggaggtaaatgacgaacattaacataacaatatttatcaaaagttgtggaaagaactgctcctccattttcataaaaaaattgtggtatatctgttcctcctccaaaaaaagacattctaaacggtgtttttgttataaccatatttttattgccagcggataatgcaccactcagctttctccttttctcagtttactatttaacttaatttcaatctctcccatacatatctcttgtataaactttttctctcacatcttctaaaaccgggtcccaacgattgacaataatcaaatctgatatttctttaaaaacgtttaaattcttttccaccttacatcccatatattctttttctgttattgtaggttcatatattttaaccgtaattccctttttctgaatacgtttcataattccctgtatagatgattgtcgaaaattatctgaatttgctttcatcgtaagccgataaattcctactatatgtggttctttttctacaatacgctccgcaatatagtcttttcttattcggtttgcttcaacgatagcccgaattatacaattgggtacattttcataatttgctaataattgttttgtatcttttggaaggcaatatcccccatacccaaaagacggattattataaaaatcaccgattcttggatcgagacaaacgccattgataatctgtttactatcaagaccgtgtgcttcagcaaaagtgtctagttcgttaaaaaaagacactctgagagctaaataagtattggcaaataacttgattgcctcagcttctaccagattcgtatacactacaggaatatccctttttattgcaccctgtcttaacatatcaacgaattctctcgtctgttgcgtgtaatcactaattactattctagatggataaagattatcatataaagctcggccctctcttagaaattctggtgaaaatacgatacgctttgtatggtatttttctctcattgtctttgtaaatccaagtggtatcgttgattttatgacaatcagtgcatccgatgtgtaccgtattgcattttgcagggcgttttctactgaactggtattaaaactgtttatttcggtatcataatcagtaggtgtagctatgatcacaaactccgcgccagagtatgcttctttcaggtctattgttgctcttaaatataattcttttgtttttaaatactcttccaattctttatccactataggggaattcttatcgtttattttttttaccttctctggttctatatccagagcaatgacttcattatgttgggataaaagtactgcattcgataaacctacatatccaattccaacaactgttatttttttcattttaatctccattccactacttttgattagcaaacataaatagtaactaaattttgcaattcttctgtattgtgcaataatagttttaaatttccataccttatctgctctttttttagtagctttaaagtcgtataatccaatatgaaaacatacaataattgatactgttgcagtgaaaaatgagtgtatgcaaataaaaaaggaacctaaccccgaagtcatagttccctcttacaataaataaaattacaaatatcatattccctgattttttataataaacattctccaaatatataattccaatcataaacaattactaccacaggttaatacgttgtaaacatatattactactttgtatgatgtttaaataactttaggcacatacatttcctttctctaattacaacataatatcgaatcaaggtaacggctgtcagtacagaataagcaattatattccccgctgctacccatagaaccgacatatattttgctaaaaaataaaagctcacacaattaaagacaagtgcaggaataattacataaaggcaatattggaataggttagtcttataaatcaaatagcagctaactggtcgaacaatattatatactgctgttccaattaaaatcattagaccaattgaataaataaaatcaatggagttccctgtcagtaaggcaataaaaaatttaccgaaaatgaaatatccaactaaggctgtaccttgaaaaaacattgcataaatcacatactttttgactgtctttaaattccttattttctcggtagaaatacttagctcaatagaacaatacttttgtataatttgaaacggtataaccagataatttatggcagttaaggcgacattatattgtccaatatctgttagtcccataaaccagctcataaaaatggtctccccactataaataatatttgtcaggcagccaatcacatgattaataagcgcaaaatctataaaagctgttcttatattttgtaatacctctactttagacgggatacgaaattcgtacgccagttcccttttatatactcgataaatactgaaaaactgaacaataattgttataaattgtttgataaaatacatccataaggtacctttccaaaatagaagaaagctgattatcaaagaaagactttttatttttattgtattcatcaataattttctttgccgaaatttgatttccagaaccaacctaaatagattatataagtttgtaaaaagagcggttaatccatgcgacgctcctacaatcaaaaaacctatattaccagaggaaagatacagtaatattcccagcaaaaaataagcaaatgcgagtacccctcctagaacaatatcaaatataaaataagaattaataatagttagaatctcttcctcttttgtttctccccatactttaagtaaataattttcaggcgctatagcaaaaaaattaataattgtagaataacctgcaagaattcccacgatagcatagtcgtcaatctttaaacaacgtattacaatgataccagtaaaaaatgtcaatgcaagttccaaaaatttgtcagtcaaaccaatggcaagtattttcaaacttttatttgtcagtaccttctcatgtaaaaaggattttatatttgatagcatattttttacctttttttattttcacgttatcttccgaaatgtttaggtttttcaaagtacccatagcacaatagcctgtctctttgcccaaatggacgcattcttcatgctgcaattctaaaataattttaggtgatattcggaatatatttttttgtttcttatctattttaatatcttcaaaaaaccataggttaaaaaaatagaatctttcaaaacaataccttctttcaaaatttaattgttctgtaacttctatgtaatcatcgaaaaatcgaaaaattcgtctgaatataacaccttgaaagccaattttcaaacaaaatatatcttcatctatcttttctatactcgcatcactagaattccgaagaaaaaaacgtttatcaaatatcccaattatagtttttataaaattctttaccaacataatacctcttccataaggataagatatttttccccatggcataggactctgctctcttgaatatagtgattctgcatactgctccccaccataacaagggtaattaccctttcgtttgctactattaaaggaaattgaagatcgtttgtccaatacccgcctccgactgcaagaactgcctcatattttttctttttcaccacaagataacgcctatttttgaattcaatatactcctctgtattatcttctcccaagtactcttgaatttcattaataccagcagcttttattaaattgattgtacggcttaaataatagcaaaaaaatgcaatataatcgctataattattatatggataccagcctaaatgtcgtatatccgttgcttccaaagtcaattttgaatttttttcaaatcgatttaaaactaatggcagaggcacttcaccctcattgttgcaaaatgaaccaatatattttacaactcgctccaggcaaaaaatcattttttttgaacctgtttctaaatatccctgagtaagtatataaagcaaacaaccataaccaaatatttgttcttgccctcgcccaataaaaagtgaacacccattgctcaaaacaaaattggaagaaaaatataccgccctaataaaacgttccttataaaatttttttcctgtcaattcataaagctcatacagtaaaagtgcagaaaaagcatgatattgcagtgactcaacattctcttcatctttaataagtccgctttcctcctgtgcagaaataatcttcttttctgcaatctcacaggctctctcaatatctccctccatagctaaacatacagcacgtaaaagtgtccaattcgtacatggtgtacctttaaagtgtaatggatacaaatatgtatggatatcttttactttatccatcgctctaattttcatcaatgcataattattgaattcccaatgaaaattttctacacttttatctttttttttgtataattttaaataagtttctgcaaaaggctcattatttccgtcttctgtaagcaatagtgataatgctgcaaagctctctccataataagacctttcattcaaatcaccgtctgaaatcgcatttttaagatattttgttatcatttcccgcattatttccagttgatatatcatcctgttattcccctctttaaggcatgcagtattagacgactttcacctgaaaacataaattcccgaataaatttcataatatgtttcttgtaataatactgaaatccctttttagcccgaggactttttccgatcgtcgccccagagtgcttatgataaatcattaaaacttgttttacaacagccacctcatatcctctaaatatgatccgtgtccacatatcccaatcctgacaagcaggaaatttttcatcgaatttccctgctgcacatatagcctttttagtcaccattacagatgaagatgggataaaacattcctttaatatttcttttttagcatttccacttatattcgccctgtaacaataaatctccattccctgttcaccaatggcatccgcccaggtataagatattcctatctttgaattgctaaacgatttgagctgttcctctaacttatccttggtccactcatcgtcgtcatctaccagagcaatataatcatattttgccaaatcgattcctctgtttcttgaatatggtgctcccatattttgagaatttgactcataatacaatgaaaacttgtttttatattgaccaatcacctctttataaacactttggttttccgagtggtcatcgataacaatcacttcaaaatttctgtaggtctgttcctcgatggaatctaacagcctttttaaataatctggtcttctatatgttggaattattatacttactccctgcattccttttttcttccctgccttatctttttgtacgctatcattgccaagtcactcgccatatgccctatataatataatttcaaaccttgttttgacataatcctttcgccatcttccttagcccatttaacaaaatagttataatagcgattaataaaccgattgttatttttgattctgtaatatgtatgtcttaatacacctacagaatgctgtcctccatacttttccactaattctttttttagatggtagcactctgtgtctgttgtatataatataggtattcctaccattcccatctttacctgcgcatctgtttcttctctgtaaccatttacttcataatcttcacaatatatttgtcttccataaaaagaacgcttaacaagtatgattgcatggccataaggcacatacctatcctctatcccatgaaaacgataatatccctccaaagttttataattaaataaaggaattttatggttattttgttcttcttttctcttctgtaaatccacatcaaaccctttgaacaactagttaaacaatcatatataatcgtgccaaagcaaatctgcttttgaggttgttttttcaataatgtcttaacatagtcataacgcagttgtaagtcgtcctctccccacaatatatattctgccctagctttagctagtccaatatttcttgttgctcccgctcccatctttacttcattttttaaataaattacatctatattttttctggcagctttatctctgattacagatattacttcatcataagagagcgtcgaaccgtcatttacaataatcaactccctaatatgttcttgacataaataggaatctatcacttttaataatgtctttggtctattacatgttggtataattattgataccatttattttactcctctgcattcaatgaattaagttctcgaaattcacacagaaccttccaagtcagtcgctctccctttttcaatctaaccataggaaatgcattaggattaataaaacgcataagctttgatttgaattctttccgttctcctgcataccaaagtctttttttaagatactcactcttaaggattattctggataaccaatgtggaattgcttttgttttataccagctgttacataattttataatttcaatatctgagcacaccggaatcattctgacatggacgatccattcatcatgatttgaatcccttacatacataacaggctgtagcttcttgtgacatcgcttgtcaataacctttatcctacattgaagagtttttccactcaaataaacttcatctataggatactgatgataaatgttggttccttgaaattctattgtttttccggctatctctgcaatagaaaattgttctcttggaaaacgaaatctcatcacaaaatccattaaccaagtatcttccaaacaagttaaggttgcttctcttacaatttgagaatcattttcaatatgttctgttccttctaatttccagtgtccaaacttcatcttaatttcagtttcataatgatactgctttctgctaaagtcttctttgaaatagccttcctcataccggtatccaatccctttttccaatgaaaagaaggaatccatatctgccgtctcaatcccccacggcagaattatatttttatttttaaatgtcagctcatttataaccctatctattattttaaattccatttttcttcctttactcaatcaattccttcattatgcttaacaatctgatttacaatttcaattatggctgctgcaaattttttacctgaagctagcttaagggccacctccctcgctcttttacaataataatcataattagcctcaatcagattaattcttttttcaaactcctctgttctctcatccccgctatctatcacaaattctggatctcattacgtaattctggtccaattcccacatcaaatataacaacgggaagaccacaagccatagcctcaagtgtcactaagccaaatccttcaaatcggcttggaaaaataaaaatacggtatttattatagtatttaggcatttcataattatttaggttaagagcataacatcgtttattttggttcttgactgtggtaataagatctatatcatatatttcctgcaatttttctaatatatcaattcctttcccataataatcatatctgcccacaaaaaggtatccttttctatttttaatctcctcataatctggctgaaacaattcacaatctatcccattggccaaagaatgatacacctttattccatcttcttccaatattttttttataaaaattgtttccgttaaaacatatttccccttgcggcgtacctttggatataggcatttatgattaaatatattttttctttaaacgtacgaaattttttggtatattgataatatcctttataactcccatgaaaatatacaactacattttttcctgtaataccatacccatattcacctgagcagataactatgtcatacatgtcatacttttctggagcaatatattttttatagtatcggctcatataatatggatatccaattaacttatacaggggattttttttatttatttttatatctttgctgagcatctcattagtaagaaattccacgttgtaattatttttttctaatatctctgccagattggcattaaacacttcaactccaccaactccctcttgctttggcgctatgaacaaaacattcatttattttcatcctctactggtattagacattctatcttcccatatactggccctctgccgtaaataagtccactgaatgtcacaaaaatataaattaaatttgattctaaaatatatccacctttaaaacttgaaaggaacacactaaaaaaaattattgtatataattgtttcaaatgatattcctcttttaatctttttctaccacctatatacatacaaaaatagaatacgcttacgaggaacaaccccattattccaagaccaaaaataatttgaatgtatcctacatctgtaaatctcacttgagatgcattcattagtccgttacccaaaatcaatgttatcaaattctgcggaaggaaatagtgattttttagcatatcattcacactagcataataaaaatttcctgttttttttaggttgacaaatccctcaaagataaaattatacaactgagtcagagcactatttgtattcgtaccgaatagcatatataaaacaatacttataataccaagcgctgcaactccaataaccaaaattcgaaataacattttatttttactccatctctccgccttaaaatggaatagtaaaacgatgccaaaaaccaaaactcctgttctggaggaactacaaattaaaaataactgaattaatatcaaaccatatgttatccctctttttcctttttggatagaataataataaattgtaaatgcactcataacagctattatgattccatttaaatcaaaacctgtattaagtccattaattctcaccgttattaaccgattaagaataccagaaaatattgtattgtaaaaataatcccttataccaaataaattaatatattcagcaaatgagaatagaagattaagtcctaaaagcagatatataatagtcaaaaattgctctaactttaatatattctgtctagacaaatcttgaaacaactcaaatagcaaaaaaatcctgagaaaaagaataaaataatatttttgatttaaaagtacgacagtccacaataaaatatacgcaaataaaataatctccagcattaaaacaacattgttttttttccctctgaaacataacaatatacatgtagccaaaagtataatcaaaaataatttatccagtttaaataacccgccaaacatcattaaaaataaaaaaaagccaaaatataaatctgcgtatattacagactttttaatagtgctaatcatccaaattcccttcaataatctgcttccaacgttgtgaacttaactgcatagaatattctttcttaaatgtagacaatgctatctcatttctttcccttttttcattctgagacagggatgcatatgacgagaatgctttacaaaaatccgatgcgctgtctgccacgtatgaaattcttctatcacttttttcatatccgataaaagcatgagaagttcctacaaccggtttaccataagaaaatgcctctgcgattttaaccttcataccagctccatcaaatacaggagctgctacaatatcacattctctgaaatatggttccattttaggtggtgaatcaatcaacctgatgttttctttcacggaaagtaattcttttaatttcttagacggttttgcccctgcaataattaattcaaactcaagatttagcatcggataaacctgctcaataaaccaactaatcccctgataatttccaccaaaccataatgaaccggtaattaatattttaagcctacttttaccctgttttatttcttcattatctgtattttctttttgctcctcaaggcagaccggaattatcgtcattttcgtctctttaacatctggatatagttccaacagtcttgccttatccgactctgttaatataacaagagcatctgcttgattcactatccttttttcactttttttatttgtatgataaaccagatagctttttaaagtctttctcatcctaaagtctttaaaggcaaaatccacctcgacattgtgcactcgtacaaatatccgtttattttctaatacctccaggcaataatcctgttttgtaaaatccattacaattgcttcatactgtgacaaatcaacggttttcgtaaaatccatccaggcccgatatcgactgtttgtaattccatgcaatccatcccaaattttttgctgtattttttccgttttattcagaacaaacaatgttctatagagccttgcataatcctcctcttcaatttcaggcccaacatagtctatttcatagtgattcctgtatagcgacactaatgtctgagctacaccaattcctcctcctcccctatcagagggaggttgaggagtgatatgtaaaattctcatgctttctcctcgttagttattcaaactttatatattaattaattacctaatcatgtttataaacctgtttcagaatattctctgtcttttcccaaccaaacttctcacacacaaaacgcttgcctctctgagacaaagctttatattctttatcatcatctattatctttttaatctttatgcaaaactcgttatccgactctgctatggacagtattgtcccttcttcatctattccctctgccccaactaaagtcgtcactacaggtactcccagcgacagacattttaatacttttaattttatacctgctccttttaacaaaggaaatacgcctaattgacatgttcttatctctttgtcaatatctggtacaaaaccactgataaaaactccattcccttgctttttgcaaagctcgtccggcggcccattacctataattgccaactccaattccggcacttcttttttaagtttccgcactatatcaattaagcgaaaagccgcttcataattttcacttcttcccatctggcccacaaagcaaattctatattttttatatggtctttcatctagagcatccgaatattccataccaaaatatggattcagaacttgtatattatttatttcatacctctccccgattaactttttatccttttcattaaatacaaaaagctgatctgccttagtacaataacgtttttcccaaaaatgaactagtttcatctggcttttgtaatacaataatttcaacttattggtttcataattcatttttctttcatacgattgttctgtaaaatcatgctccactaaattaaatataaggccgggaaattttttctttaaccaaatgtactgtcccatagccgcatactccgcatgaacagcctcaatctgtttttcttttatcagctttataatgacctttttcacccctctgtggcttcttgtagcgaaatatgcaggaagccacaaatgtgttataacattaaaagccttgtgaaagcgatttaatgtaaagcaataatactgttctgtagacaggctttctgcgattttttggtccaacttggtaataataaatgagaccacatatacttgatgctccttgctaagtgtctccacttgtttccccatacaaattccgcctgcatggttctcatccaaggcgggtaaatatggagaaagatgtaaaattttcatatcttccatccccattttttaaaatattggtacattgaaatcaaaaaccgctttctccctattgctgaccttatgttatcgcgtttccaggtatgaattactgctgtatacggataaaagaaaattttatgtgtctttctcaatttttttgacagatcagcatcttcaaaatacataaagtagcgttcgtcaaaaccacctatttgtctgaatatatctgacttaacacaaaaaaaacaacctgtacaaaaatcaatttctgtcggctgttctaaattcatactctctctcgtatattcttttctcaaatatgtcaaaaaaggaattttactaaacaatacatatcgaagactaggttctttttgcggtagatactgcctgcttccatttgggtttataattttaggtgtacaggaggcaatcgtatctgcattactttccataaaatcaaccattgcagcaaccgaatcttctttccaatataaatccggattgatcacaaaatgataacctccatctttcaaatagggaagtaccagattatgtcctcttccaaatcccagattttgtttgctcaatattaactttacttttggataccgttctcgtatcaattcaattgtcccatctgttgatccattgtcaacaatatatagaaccattttatattttttattgtaagaaaacaaagtgtcaatacatttaacaattgtttctgcattattatatgtgacaatacaacctgtaatattaattgcccctttttgtcctgcattcatctaaatctattcctttatccttaatgttttatccattatctatgtttttatcatccatcaaatatatctggtttccaaacgctttatttataagtctgcctatcttcccaggagtagaactcatcagataaatgctccaattaaatcccttaaacagaaaaatcttttttccttttctttctgcaattctcttcaccatttcagctgttctcatatattccggatcctgcggaaaatacaaaccatctccctgactttcaattaaatttcttataaattcacacaagacttcaactgcacacacacttctttgattctgaaaatcagggaaaactggtacgcatgtcgcaatcttttccagcatccggtaatttcctttgcagccgctcccataaatcattggaggtcgtaaaatagctacacggaagttttcatctgaaagtggctttaacttttgctcagccctccacttactgtcaccataaaaattagaaggtgacggcttcgtctccctcgtaatcacttttttctttctaacagacgagccttctccataaacaataatggagctcatatagataaactgttttacaccttccgtttttgcttttatcgccgcttccgctgccaggtcacaattgacggcataatacaatttcttttgtttttccgtcacttttccaatatcagcgtgggcaattcctgcaacatgaaatatagaatcataagttgaaaaatcataagttttccaatcctttttccgcatatctaaggtgtccacttgataacgccccacaaactgcggcttttcaagccatttttcaaaagaagtcccaatataactctctgctcccgtgatcagaatccgtttcataaagaaattctccagttctttatcctctatttcgttaccttttttagctctccagttccaccttccacgactccatcatgttttaatacagaagcaatcgtcttaagaaaacaaatacaatcaagacgaacccccatatgtttcacatattccccgtccagcttagcctttgccggtatttcgagctcatcccttccgttcacctgcgcccagccagtcagaccaggcagaacgtcattggcaccgtacttgtctctctctgaaatcaaatcatactgattccacaatgccggccgcggcccaataatgctcatctcaccttttataatattaaaaatctgcggcagttcgtctaatgacgtcttccgcagaaaacttccgacccttgttatgtactgctctggatttttcagcctatgggttggcatatctttgggtgtatctatacgcatagtccgaaattttaatatattaaaatgcgttttatgaattccaatccgttcttgtttaaataaaaccggtccgtttgaatccagcttgattgcaataactaaacacaaaaaaaccggggatagaatgactaaccccagccctgaaagaaacaggtctattccccgtttccatttcatataatgtttgttttgtttcatataaaagcccctttacatcaaaccttagatacgttctgctgattcaatcctcatcccccgccagccgcactcccagttgaacccgccttacttctcctaaaaataatagttctacaatcacaacacgtttccgcaaccgttttctcacaatctttccaatatactcacccaaaaccccctgcgcagatataatattgccctgttcgttcacttctatcagagagcgtctaaccacatattccgaatcatttccaatcagttttttcaataacacctgttcctccggaagtacagtccagaatgttccgtctctacccaaaagctttgtcaactttggcacctgttttaagtcatagaaaaaaatatcaggggtgtctgtttccacaaatacataggatggaaacaatggttcaatatgcacgcgacatttcccctcaattctccaaacacactcccgctgtattacaaaacattttgtatagctgttttttgccacaactttatcaatgacaccaaccgtctctacttctttcccagttatcgtttgaatcacataccacatcgttcccaacctcacttttgggtatgctccgccatcctggaattgattcccaagctgacgttctctgtgatccattctcggccttccatgacatagatcacagaaagcatcccaatttcttttattctcttctaaaaatcgctctattctatagtaagcgcttcacttatacggcccgatcctgctccaaactgacaccaaacaatactgcctgcgtcctgttaaatagttctacctcaacaacagcaaaacgcttatgaagattcagcttcacaatccgatccctgtaatgttcgagaacaccatctgcttttacaatccggttctcttcatttaaactaatctttgtgactcccataacctgctgaaggttttctccacagacgtcttgaagaaagcgaagatctttttcatcgacagatgcaagcacatttctggcatcaccaataaattgggggaatttcctggctttctgcagttcatctgcaagagcctttgaatcgctcgtttttaaaaacaaatagcctggaaacatcacatcctcaaaaagatgaagaactccaccggaacggaataccttcactttcctcggtatcctgcaatcactccataaattatggctgacaacccgttcaagaagttctactgcatcctgttccctgcccggcacagtatataatgcataccattgctccataaggtatcctccttgtcgcttaactacttattaagcgacagcttattctctttgctaatacgattttgaaattaatattataaatcggtcggcttcctagatataagaatggaaaattggtaaaataataatgaaataataagaatttattaggatatattgccatttcttttctgttcaggcggttgaccatgccggaaaagaatgctataatttacgagaacttaagatttgtgcaaaaaagtgtcgcttaataagtagttaagcgacactttctgtttacttttatattattacatttcacattaccttcattttcaacgagacatctcccgacaaaccggctataataatactaaaaataaaaaccacattaactactgatacatcaaataagaaagcgaggctccctccatgacatctaaaaccactcctcctcttcgggaaatctatttcgcaggcggctgtttctggggcgttgaagaatatttttcacgcattcccggtgtttatgacagcatttccggttatgcgaacggcaacattccaaatcccacctatgaagaggtctgtaccggcacgaccggttttgcagagactgtccgggttatctatgagccggatattgttacgcttcgcatactgacggagcagtattttaaaattattaatccggtcagtatcaaccggcagggtaatgacaggggcagccaatacagaaccggtattttttacgcaaatgaggaggataccgcagccattcagcctgtaatgcaggccatacagaaaaaattttccgagccattggccgtagaactggcaccaatcaggaatttttatccggctgaaagctatcaccaggactacctgaaattgaatccaaacggatactgccatattgatttcagcacacttcatgatttaacaacacggccggacgggaaagtaggccttcggcttgccggtgaagaattgaaaaatacattgactgaggaacaatataacgtgacacagaactctgccactgaaaagccttttaccgggaaatattatgataaccatgaacccggcctttatgttgatattgttaccggtgaaccgctctttatttcttccgacaaatttgattccggctgcggctggcccagttttacaaaaccggtggacagcagcgccgtgacagaacacattgataccggctacggcatgagacgtactgaggtgcgcagccgcgagggagattcccatcttggccacgttttcacggacggcccaaaagaatccggcggtcttagatactgcatcaacagcgcctctctccgcttcataccggccggacagatgagggaggaaggttatggagcctatctctccctgctcaattcctaaataataactctctctatctacgccaggtgtgcgtctgagaagctaaccgcagggtccgctgcgccgccgcttctcaggcgaaaactgcattttttcagtttctgtgcatcgcatgctgcggttcgcaaaacagcgtttttagcaggaccgtgaataccgggaatagtgactgcttacatgttctactgctcttttatccactcaaacaggcttatctgccgtcccattcctgcttcctgctgtttcagccttcccgcctcttcccgctccaaacaagtctcgggcagggcgtttagaaactccgactgctctctgtccgtcaccagaatcaactgctccttagccctggtcattcccacataaaacaatctccgttcttcctctttgtccttttcccccgactgcccctttgtctccagaggaatcagcccttttctgaccccgcacagaatcaccacgggaaactccagtcctttggaggcatgcatcgtcattaaagtaaccgcatctgaacggtactgttttttgccgggccgaatcaaatctccctctgtgccaaaggcaagtgcatcggtaaattctttcatattgcggtacatgccggaaagctgcctcagcttttccatattctgattatccaggttctgatcggcaatccatttatccagaatgtcataaggtttttcttttatcatcagtggagaatacgtttttgcggctctttcaaatgccgcttcccgctccggaccatccatcccgttccagagaaggcgttggcaaagctttgccaaaaagcgctcctccccgtttaacaggcttctgaaaaagctgacacttcctctgacagccgtatcagccagaaaatcatcccggccggcaacgcggtagggtatcccttctttcctcaggcatgtctccaaaaatgccgcctgacggtgtgtacggtaaagcactgcaatatctgaaaaaccggataaacgccctgtaacccgtttttcctgcgcatccagcatatcgatgccgccaatgagccggttgatttcttttgcggtaaatattgcctccgcccttacactttctgccgtaaccaggcggatgggacttccctctgtacacacaggttccagtttccacctctgacccggattttctgagatgactgcctgcgccccctcaaggattgccggtacggaacgatagtttttattaagggcaatctcctttaaggagggatactctattttcaggtattcaaagcaggccgggtccgttccccgaaacccgtagatggcctgatccggatcccctatgacaaaaagctctctgcccccggaattccaaagtctgataagctcaaactggacgggattgacatcctggaattcatccaccagaaggtaatggaaccggcgcctgccgatttctttctttggctctgacttaaaaagtttcagagtctcaagcagcaaatcgtcaaaatcacatactccctctgccagtaaccgtttctgatactcagaagccgctttgtgaaaaacagtattctcatccgtatctttcccggcgcctgatggctccatccccgatttttccagagataaacgcctcaaaaatccagacggactctccggcaatccatattcctttacagtttccccggctgtctcaaggagcatctcttcctgcgccggaatgcattcaaaatcattctcttttaatatttccaggcagatagaatgaaatgtaccgatattcaggagacgtactgtcttttttcctcctgtctgcttctccagacgctgtctcagctccgccgccgctttatttgtaaatgtcaccgccgtaatctctgaaggttttacacctctttctttgagcaagtgcagaattctcgcagtcagtgttcccgtcttacccgttcccggaccggctttaaccgagactgcccgggccaaaacggtaactgcctctttctggttttcattcaggaatatttccccaggaaggtcaggcctctctattatgattccttccggttccttcgatgcagccgcctctgtgacagacgcatccggcgtttctgccttacgaaaaatttccgtcggaatctcttcgatcacaatatcctgagacggcaaagccaggctgatctgcccgtccacattatcaagttcccatggttcaaacaactgaatcgtcccgtactctccgtcaaatcccggctttcgctttacttccccgcggcgcagccggctgatgccctccgctatcattgtccctgccgtcagcctgatatcctccgcaggtacatttctcaagatggaaaactcatctcccagacgtcggatcatttcctggtacatccgctggactctcacaccggcagccgattttccggtagacgcggcgattacctccgggaggggcacaagactttcaaacacttttccatccggcctgagatacccttccgcccgatcagccagctcttccacacggtgcgatacgcctatcgtcagtttttttccacagaccgggcattttccgtcaaacttccgggcctcagccggactgagacaaagatggcacttgcggtgcccgtcgaaatgatattttccttcctccggaaagaattcaattgttccctgaaggccctcgcccgtctcaatcgctttctttagtgccggataggacagctccccctcgatcagattggcctcccgccccagtttggcaggcgaatgagcatcggaattggagataagctgataggaatcgagagccgatagtctccagttcataggcggatcagaggaaagtcctgtctccagagcatgaatatgaggcgttaaatccccaaagcattcctggattgtatcaaagccggagaacgctccgaataatgaaaaatgaggcgtccagatatgcgcaggaatatagacggcttccggacaaagctccagcataatctcaaggagatcatggcagggcagtcccagtatgggcctaccgtcggaatggatattccctatttgttcaagcctcagtgacagccgctctgcatcctcgagaccgggaagcagaagcaggctgtgaacctttctaaccctctctccctgcttatatatggaactgatttctcctgttaccacaaatcgtggagtacccgaatcgtctgtgagcggatcgcgtacccggtattcctcctttaacgtgtacaggccctcctctgcagggaccagcttttccttcagttcttccctccatgccggatgagtgaaatctccggttcccaatagccggattcccttttttctcgcccacagttccagaatttcaggcgtgcagtcacggcttgtggctctggaatagcgggaatgaatgtgtaaatctgctatgtacattctgtttctcctttatgtgtctgtaatatttcatttgccgtaagcatccagtttgcaatataactataaacagtatagcacaaaatcacttcgggccattctattttttcccctgtttacatattttgatttgaggtgtttatatgcaatcctgtgaatttgccatgaccataaccgctctggcctgcaatcttgcccagggcaaaactccggatgagatcgccctctatgccgcttttttctcccagcttggagacactctggcaaccattgccgctcaccaggaattttgtgctcccaaggactccgcatccccaaccgcagatgtttccgagtcaatttagaaaatacgccggactgccggaaatggaaacctccatatccgacagcccggcgtatttttctgtagtttatctcatgattcagcttacgctttatattccatcggtgcctgcctcaagccgtttgctgcctgttccgtatcattcttcatggcaaactcatttttatttcttaagctgggtaagcctttcctgcacctgcgccatcatctgggtatatttctccagctttgaccgttcctccgcaatcttcgcctccggagctttgcttacaaacttttcattactcagcattcctgtaacgcgtgacaactccttagcaagcttttcttcctctttttccagacgttcaatctctttatcaagatccaccagctctgcaaacggcatataaattgctgcctgggaagttactgccgataccgcatcgtctgcaatcccggccttatccttctgaagcgccacttcacctgcatatcccaatgttgcaaagaaaacccggctatgctcaaaaatgcccagaatctcttcgttatcggacacaacatatactttcgcctttttgctcggcggcacattcatggaagtgcggacattacggattgctcgtaccgcctccttgataacctcgacggccttttcttctccggcaaagttccactctcctttgtaaaccggccaggaggaaatcatgatggacggttcctcatcctgaaggttacagaagatttcctctgtgataaacggcatataaggatggaggagcttcagcgagttaatcaggacggtcttaagtgtccacagagccgccgcttttgtcgtgtcgttgtcatcccagagccttggttttaccatctcgatataccagtcgcagaactcctcccagataaaatcatacaccttctggagagcgattcccagctcatatctgtccatattttccgtcacgtcttttgccagtgtatttactttggacaaaatccagcgatccgccattgttaagtccgagagactgacatcggcatccggcgctttttcaatattcatcatgatgaaacgtgtggcattccatactttattggcaaagttccggctggcctcgactctctcccagtagaaacgcatatcattgcccggtgcatttccggtcatcagggtcatacggagagcatcggcgccgtacttatcaattacctccagcgggtcgatgccgttgccgagtgatttactcatcttacgtccctgggaatcccttaccaggccgtgaatcaatacggtatggaacggttcttttcccgtctgttcaagtcctgaaaataccatacggattacccagaagaaaatgatatcgtatcctgttaccagcacatccgtcggatagaaatactcaaactccggtgttttctcaggccagccgagggtcgagaagggccacagcgcggaagaaaaccaggtgtcaagcgtatcttcatcctgatgtaaatgggtgctgccgcatttcgggcagactgccggcgttgtcttcgccaccgtcatctcgccgcattcctcacagtaataagccggaatccggtgtccccaccagagctgtctggagatacaccagtcgcggataccctccagccagtggagatatgtctttccaaagctctccggaacaaatttgagacgtcctgactgcaatgcctcaatggccggtttcgccatctcgtccatcttcacaaaccactgcggttttaccatcggctctaccgtcgtgccgcagcggtcatgggttcctacattatgtgcatggggaaccactctaacgagaagtccctgggcctctaaatcagccacgattgcttttctggcttcgtaacggtccatgcccttgtattttccgggagcgctgattgtcgcatcatcattcatgatgcagatctcttccaggttatggcgtttacccacctcaaaatcgttcggatcgtgagccggcgttattttaacacagcctgttccaaaatccttgtctacatactcatccgccacaaccgggatttcacggccggtcagcggcaatttcagcatctttccaatcagttccttatatctgtcatcctccgggtttaccgcaactgcagtatcgcccagcatcgtctccggacgtgtggttgcaatttctacaaaccggtcctcctccccgacaatcggataattgatatgccagaaaaatccgtcctgctcctcatgctctacttctgcatcggagatggaagtctggcagattggacaccagttgataattctggagcctttgtaaatatatcctttttcatagagctttgtaaatacttccagcacggcatcggagcatccctcatccatggtaaaacgctctctgtcccagtctgcagaagaacctaatttatggagctgcttaacgatacggctgccgtaatcctctttccactcccatgccttctccaggaatttatcgcgtcccagatcatgcttgtcaattccctcgctcttcagcttatcaataactttaacctctgtggcgatggcggcgtgatccgttcccggctgccataatgcttcaaatccctgcattctcttgtagcggattaaaatatcctgcatcgtattatcgagagcatggcccatatggagctgtcctgtaatatttggcggcggcatcacgattgtaaacggctttttgtttttattaacctccgcatgaaaatatttgctgtccagccatttctggtagaggcgttcttcaatgtccgccggattataagtcttctcaagttctttcatgtgtatctccttttatttttattggcttttgttttactgccaatgatttatttctttttgattcgcaaagcgcatgtttaaataaatttaaaagattctatcacctgcatgatttcctgtttcagcttcaggtccggctcaccgtcctccgggaaggttgccgtaataagatacccgtcttccccgtccgataccagataaaggagctggttcatccggtaattcccggtgctgtcggtcattgtcatgccaagcccggccatttcaccgcttatctcacggatatccgttgtcctgatatccggatacgcctctctcaaagcgtctacataacttccggcaaaggtatctttaaaatctgaaatcatctcttttgtaattccgtctgccggggaaaaagaaatccggaccgtactgtcttttataaggcagagttcccacgcgtccccgcttttcccggactgccatctctcttcatctgccgaaacagtatacttgccgtctccgcttaagcagactccgtttttaaaagttcccggttcctgggctgcagcctcttgttctgcctcgctcccacacgccgtgagcagtatagctattatcatgagcacagctatcacagtattcacaacggacgctttcaccattcctgtcgttctctccgtcatctgccgcctccctgaaggaataaacctgccactgtcaactgtggccgttcctgcatatcacatctgtttcctgacaatacggtactcatcatctgtctggtagtatggacattcaaaacgttgatttccaagaaatgacgccatctcatcttcgtccaaatccgcctcacagacataatagccataatcgtcatcatagacataattaccgcaggattcacagctctgcggcccatcctgtttcttcaagccgtcacctcctttacaaaagcgttccgtttaccgccgcagtgcgatactccgcggagcggtttttaattaacaggtgaactttcctgttaaacaagaaggaatcccgctcgcgggattctccgcctgcggcgggtcgcttcggcgacattgttccctaccgccgcagtgcgttcctccgcggagcggtttttaattaacagatgaactttcctgttaattaaaaaaaccccttgcataaacttatgcaaagggcgaaatatcttccgcggtaccacctggcttctgccgaattctctaaacattccggcaatctcattcagtcctttaacggagactatccgtgattccctacttgcactctgctttggggcccccggctccgaagctaccttccatccacaccttccctgaacagcctctcaaccgttgagccgttctctctgtcggggttgtgtatgtactcctcttcttcacagccttttcttatatactatgtaatcatagtggtttttctcctgattgtcaagccggtgccgtatttttttacgcagctcctgtataaacagggtaacagttcagacaggccagcaaatctgctgcgctgaccttgcgaaaaggtagtggcagcagcttatttgaatggtaccccataccaattgccaaagtcctgttattttcagccattgcccgttccgctctcttccctgtcttcaccctccgcacttctctcttcatcgttcctggtttctgcttccctgtcatccaaacgtgtttccactaaatatctgggcctccgctttgtctccagatatatctttccgatatattctcccacgattccaatcgataataaaagcagaccgccgataaaccagatggaaaccatgatactggcccagccgcttactgtatttcctctgtaaaaatccacaaccgcccagaccagaaaaccaatgctgacaaaaaaggacgcaatcccggcaaatgtaatcagcctgatcggttttatgctgagggaagtaattccctctattgcaaaagcaagcatcttgccgagaggatacttgctctctcctgccgccctctctttcctgtcataatatacaacgtcggaggggtatccgatcatcggtacgatcccacgaaggaacaaattgacttccgtaaattccttaagcccctttaaagccctgcggctcatcagcctgaaatccgcatgattataaaccgtattggcgcccagaaggttcattagcttataaaatccctccgcagtcagccgtttgaaagcggaatcggtcgtcctcttcttcctcaccccatagacaatatcgcagcctgctttaaaacgctcaatcatctgatcacaggcatccacatcatcctgcaaatccgcatccagagaaatcgcagcgtcgcagtgccgggctgcctcagaaagtcctgccagaagcgcattttgatgtccccggttgcggctcagcttaagtcccagaaagtaaccgtcttccctgttcagattttcaatcagtttccatgttccgtccctcgatccgtcatccaccagcagaatacggctttcctcaccgataacccccgcattaatcagcgtcaccagcttttttcccaaaataccggcagtcaaaggcagtacttcttcttcgttataacaaggcaccacaaaataaatgatcggtgcattttccattttctctcatctcctgctgtcttttttaaaacatactgctcattatatatgaaaacagattaaaaagaaagggggacttacccgagtcgccgccatttatcaatgcttttctttgctgaaagccaaaggaaaattttactgcacccaaacaccattttcatccaccaaaaatccgtccggcgttgtgcctccggtaaagagtgagccattatcgtccacataataccacataccgttggtctccacccatctggtctttgccaggcctccgctgttccggaagaagtaccagatgccgtcgatctggttccagccggtcaccatctggctgtcgttattaaaatgatatatctcattattaatcatcatcgattcattccttgcatatgtaccgtccgccttgacaaactgccatatctggccgttctgtatccacttattggcgtctctggcgttggctccgggaccgccggccggggatgaaggcgctgtgcctcccggacctgtctgctgcccgctctgctgaccgccggccggattctgctcggcagccagatatgcaaagccgtaatcgagaagcgctttggtatcagtataatgtgtctgcttactcttcaggacgacggcaatgagcctctttccgtcccgctcagcacaggtgacgagtgtattgccggccagggatgtgtatcctgtctttccgcccacaattccctgataatattcaccattggcaggattcaccatcttatgccccatcgtcagttttctgaccgtgggaaccgaagccgtggccggaaaatcatagcttacggtggatgctatctggctcaacgtctgattctcaaacgccgcctttgcaatcagcgccatatccctggcagtcgtatagtgattcgaatcattcaatccattcggattgacaaaatgcgtattggtacatccaagggaagccgccttctgattcatcagatcggcaaagccgctgacgcttccggccacatgctcggccaggccattagccacttcattggcagatttcaataaaagggcgtacatacagtccttcacggagaacttgtccccggctttaattttcagtgtcactgcgcctgcctccaagtttgtaaccgcattctcggaaaatgtcaccgtatcatcaagactgctgcgttccagcaccagaagagccgtcataagctttgttatgctggcaggataaaaccttgtatctgcattctgctcaaataaaaaccggttattcaaagcatcgtagagtaccgcccctgggatgccacaaccggagtctccagagaacctgaagcagttccctgggaaggatttgtccctgccgtaccagttgtcccgttcccctgggatgttgtaacggttcctgaaagagccggaaggcgtgaagggctggatgagccggtctggctctgctgcgtctgctgcccctgccccggattttgccccgtctccacccccggccccgcagaaggccccataacattagccgaaacagttgaaaccacagccatcgacatggctatccccagacaaagcgctgctttaaaattcttccatttattcatccgtaatactcctgtatctctcatttttataattgtcggtaatatttccgacttcattataaatattgaagccgttttcccatttcatactttaccattgtacagcattttcccatattacacaatcggatccgaaagttataattattacaattttattacagactaaatgcacgcccatcttgtaaaataccactgttgcataaaaagctttccttgtctttgatcagttattttaaccggacatatcagcacatatatcctgttaaaccggatataatcaagtcatatatatcttacaatcatatacaggtggtgatataatgtacgaagagctattttataaacgtttagttgaattacgtctgaataaaggcgtctcagcccgcgatatgagcctctccataggccagagcgcaggatatataaatgcacttgaaaataaaaaaggcatgcccagcctgaccgtccttttttacatctgtgaatatcttgatgtcactccctccgaatttttcgatgagggaaacggatatccctccgatctgaatgagattgtggaggatctgcgtcatctcaaccggtcctatctgcaaagcatcggttcaatcataaaagggctgcgcagatgaattagtatccactaatttcttctgcagctgcccttcttgttgtagtagcttcctcattatcccagcttgcagacgtccacccacatctcatagcctgagcactgttccagttcttccatcgtcagttctattgcactgttgctgctcccgcaggccggaaatacagtcgcaaaccgcttcatggattcatccagatagaccttcaccccttcattaatgccaaacgggcatacaccgcccacggtgtgccccactttttccgccacttcatcaggggagagcatctttgctttaaccgcaaactgctccttgtacttatggttgtctattttcgcatcgcccgccgtgacaatcagtatcggttcttctccgattttgaatgacaatgtctttgcgattctggccggctcacagccaacggcctgtgcagccagttccaccgtggcgctggatgtctcaaactccagtaccctgtcatccatgccccattttttcatatgttcttttgcccgttcaatcgacattcccgtctcctcctgcttaaattgccgaatccgtcgataacgtttcacggacccggcaatgaattttataaatattttcttctaagttccgctgcgctctccgcaacaaggtatcccggtgcaatatcaaatacggtcttgcagccgctctgtccctctgcgttcatcctgtaagccgcccgcgcgtaagaaacgataatggaggatgtaaattccggattcgaatccagcttcaggctgtactctatcacatggccgttctctttattccatcctgtttttccgcccctgagcacaaatcccccgtgaggcagacgggtgtgatctctcttcatctcctcctccgttataaaatgtacggtcgtatcgtaatccgagaaataatttggcattgtcttgatttcattctctatttttgccttgtcagcgccttcttccgccacgacaaagcattctcttgtgtgcttctgccttgtggtcagttcaggatttttgccgcttctcacttcctccagtgcgctctccaccggaattgtatactgtctggcatcctttacaccctccagccttctgattgcgtcggaatgtccctggcttacgcctttgccccagaatgtgtaattctcaccctccggcagagcagccatcgcatatacacgtgcaattgagaacatgccaggatcccagccggccgatatcaccgctacttttccgccctttttcgcagtctcatccacagcttcaaaatgctccggaattttcgcgtgagtgtcaaaactgtctaccacattaaaccactgggaatacttcggcgtctgtgccggaagatcagtcgcgcttcccccgcagagaatcagaacatcgatctcatccttcatcttttccgcttcatccgccaaaagcaccggaactccttttgtcaggatttccactgtttccggagcacgcctcgtaaaaacggcctttaattccatatccggattctgtttcagtgcgcactccactcctcttcccagattgccatagcctaaaataccgattcttatgctcatttttctttcctccgtctgtaaatgattgccaaaagggcataaaaagggagtgattcctcactccctcgtcagttgttccctattatactataaaaacataaatttttccagatctattctttatattctttccactcgtttcccttacaaaccttttactgcctgtttctgcgcctgataccatgtaagaagcagcggctcaatcctcctgttccagattgtcaaacaaatcgcaggaataaaattcccggatcgacatgttaaatccttcagctattttctgaatgttgacaatgcccggatttttgctgcgtccattgagaatacatttcagcgtcgaaagcggcatacccgtcttatacgacagtgcatataaagtgagccggtcccttttgagaagctccctgatacgtttcacagtcgcctcacatatctgcatcttatgacctccaatctttcgtatgaatctagtttatacgaaaaattggaaaaagcagggcgataaatcatactgaatgtaaggttctggaaattttttccattttttactataaggcggcaattgaccattgccggtcattgccagcaatcggattttcgtcatcaatccagttcactcaggcctgtataaaggttgtaatatcgacctttctgacgtatcagctcctcgtgatctcctctttcaataattctcccgtgttccagaaccatgattgcatcggcattgcgtactgtggaaagccggtgcgcaattaccagtgtcgttctgtccttcatcagacggtccataccgtgttcgatgtgcttctccgttctggtatcgacggagctggtggcttcgtccagaatgaggattggagccttggacacagccgccctggctatgttgagaagctgcctctgcccctggctcaggttagcgccgtccccttccagcatcgtgtcatagcccttcggaagccgcattataaatgagtgggccgatgccgttttggcggcctgaattacctcttcgtcggctgcatccagacggccatagcgtatattttccatcacggtgccggtgaacaaatgggtgtcctgtaacaccattgcgatgttgcgccgcagttcattacgtctgatatggcgtacgtcggttccgtccaccgttatcgttcctgactgtatatcataaaaacggttaatcaggttggtaatcgtcgttttaccggcccggtggagccgacaaatgcaatcttctgccccggcttcgcatagaggctgatatcattcaggatcactttatccgcgtcatatccaaatgtcacatggtcaaggaccacctccccgctcaccggctccaccgataccgcttccgtatcatctgccggttcaggctccgtatccatcacggcaaacacacgctccgctccggcaagggctgaaaacacattgctgatctgcatggatatttcattgatcggccttgaaaactgtcttgaaaagtttaaaaataccgtcaggcctccgacgtcaaaattcctgaacacacagagcaggcctccgatgcaggcggtcagggcataattgacctggctcaggtttcccataaccgggcccatgatgcctccaaagaactgggctttaatctgtttatccctcaaatcgccgtttaaatagccaaactcttcctccgccacgtcctcatggcagaatacctttacaaccttctgtccctgaattgtctcctcaatatacccattgagcgcgcccagggccgactgctgggccgagaaatacttctggctcctgccggccacaaagcctcccgctttcatcatcagcggtatcataacaacggtaatcacagtcaggtaaatattcgtataaatcatcaaaaccagcgtccctatgatactgagcgctccggaaaacaactgaaccagcgtactgctgagcatgtttccgatagtatccacatcatttgtaaaacggctcatcaaatcgccgttattattagtatcataaaagcgaagaggaagcttctgcatctttgcgaacagctcctccctgatccgctgcagcgcattctgcgctatcgtcagcataatcctggactgcgtataattggcagccacgctgagcagataaatcccagccatcacgattaacgccctgaacagacccgcgctgtcacctctgctcccgtccaggggcacgatataggtattgatgatcgggcgcagcatatatgagcctgccaggttagtgagtgtactcacaatgacgcagagaaaggccgccccatccacattttatctttttcaaggtaagacagcaatctcttcaccgtctccttgctgttctttggtttgccgcctcccctggccgccattctgccgggtccgtgtttcttcctcggtgaatcggcaacacggttgccgtaacgccttttgaggctctctattctgttctgatccatcatgccagcacctcctgtccgtccttcgctcccgctgctgcctgcggcgcattgccgccgtcctcttcgtccccgctgttcctgccgtattgggtttcatatatttccctgtatgcctcgcaggaaccgagcagctcatcatgagtgcccataccgataattttgccgtcatcgaggacaattatcttatccgcatcctcgaccgagctgattctctgggctataatgaattttgtcgtgtccttcaaagacgtacggaatgcttttcgtatctgcgcttccgttgccgtatctacagcgctggtgctgtcgtccagaatcaggatccttggctttttgagaagcgccctggcgatacagagtctctgcttctgtcctcccgaaacattgactccgccctgtcccatctcagtatcgtatccatgaacaaacgaagtgacaaattcatcagcctgggcgctctttgccgcctctctgaccgtctccataccggcttcctcatcaccccattttaaattttcttcaatcgtgccggaaaacagtatgttcttctgcagtaccattccgactccttccctcagatttttcagggagtagtccctgacatcaatcccgtctatcagcacctgaccggatgtggcgtcatagagcctcggtatcaattgaaccagggatgtctttccgcttcctgtggaaccgatgattcccaccgtctctccgccgtttacctgaagattgatgtgttccagaacgtaatcaccggcctggccgtaagagaaacagacatctttgaactccacaccgccctttgtgacatgagcgtcttttctggccgcatccgtatccgtcaaatcaatttccgtatccattacctcattgattctctttactgaggccatggctcgggaactctgtaaaaacaccattgacagcatcatcagcgacatcagaatctgtacaatatatgtggtaaatgccgtcaaatctccgacagccatgccgcctccgataataatatttccgccataccagaccacggcgactgtcgtcacattcatcgccagcatcattaccggcatcgtcgcaatgacaatccgcatggcttttaagctgctttccttcaggtcggcgttcatctccttaaattttttgcactcataatcttcccggacgaaagacttaactacccggacattcgtcagcacttcctgtattccgttattgaggcggtccagctttttctgcataatctcaaaccgcgggaatgccagcttcagtattgtcgcaatagccgcagtaagaagcggtatcacaatcagaataattaccgccagccgggcattcatccaaaacgccataaacagcgctccaatcagcatccccggcgcgcgaagcatcaaacgcagccccatcatcataacattctgtacctgctggatatcattcgtcagtctggtaacaagagaaccggtgctgaagtcatcaatatttttaaaggagaactgctggaccctggaaaatacatcctttctcagatcgctggtaaagctgatcgatgctttggctgaaaaataggcgcccaggattcctcctgccgccatcagcacggtagttaaaagcatcacaagcccaatctttataatgtaaccggcatcccgctgagccactccattattgatgatcatcgacatcagtttcggcagcataatttccccgaacacttccgtcagcatcatgagcggcccaataataaaggcgctgcgatacggcctgacatatttcatatattttttcatattttattcctccaattattcctgccctgtctttatatcactttcctggaagagatattccaaattgaggcgcactttatccagatactcctcaaactgatccaactgctcatcagtaaaaccggcaaaaagagcattttccaccttcttaaatatcttttcgcttacctccacaaccgcctgccccttgggagtaatgcatatctgattgtagcggttatcatccttatccgtcacgcggctgatatatcctcccttttccatcttcttcagggagactgcaatcgttgccgtggacacatgctggcggttggctatttccttctgcgaggcgttgggaaactttgaaataaacatcaggatctgatgctggctccggtaaacgcctgatttgttcagctctctttccaggtacatcctgtgcagtttattagccataatatatttttctaccagcttctggttgcgtgtctccgaaccatcatgaaaattatcattcattctttttcctccttgttagctctctaataattaactatatgataattagttagttaacttatgtcaagttaaatttttatgaatacaattatgagccattgaagacggctgcagtctgtgataaagtatccttaacaatgtatgcttaaacagggaactattgacagagacgcgcaggatgcctgtcagatcgtataaagaacggcaattcaccggaatctgatgaaaaagaggggaaagaaaatgaagaaactgtttcataatgagtctttaaaaaaatatatccttatcagtatcatctgtacagcggttctggcggcggccagcgtgttcttttaccgccggcacaccctcgcgccggaacggacggtggagaaagtattagaaaatatcactgccggtattcccgcccagacttcggatctggatgaactgatcaagcaatttgaaacacaataccagccgtattttaccaatgaggcgtataaccaggcagtccaattgcggcagttcactgccttccacaatcagacccctgattttgaaggctctatccatatctcttctccggaatttgaaactctggattcttctttgggggatatcagcctgtatggaacctttcaggttaactttactcctgttgatggtacctcattcacacagaactggaatattcaagtccggctggttcaggaggacggcagatggctgatacgttatatgcggctgaaatttaataaagcaggtgaggacgccgccgggacggccagcggatggggtggcggggtggttttgtgagtctttcgtcccggggaagattgtcgtggtgttgggctgcgggcgaagataaagtctgcggagcacgctcccgctctgtgaaatgcatcgcgctgctaagctcggcaggacctcgctaatcagcgatggatttcaacggcatccgcagacttaatcttcccctccgccccaagggcaggttttcgccgggacgaaagactcaaggccaaggatatcgcccgtccgctggcctgcggccgctgattgtctcacgcgttaagtgcgggggcggaccttgtcgcggccacttagtgataccgtgtgcgggaaatatgatatgcctacaatgtgcctttatgaaaaaattgcgctagatttgatatctgcctgcggaaacacgtagtggccgcgacagggtcctccccatttaaggttggagacaatcagcggccggaacggaccatgtccggtgccgcgaaaacctccgcctgagtcttccgtctccggcgataacctgcccaggggaagtaggcggaatcaattgcggaggggacatgggagtccgccggtgcttagcgaggtccctcacgagcttagcactgctgcgcactccaaagagtgcaaacggtccccgcagcaattcattccggccggattccccctccacgacaacctacccacggggacgaaagactcatatacacacccacgcccccgtccgccggccgtaccggcggcgtcctcacctgcttatttaaatctccaaaatctttatcaattcctccctgctcatttcagccaatgaaaccattccttccgtcacaatctgatccgccagattcttctttgcttcctgcaaattcagaatattctcctctatcgtatctttcataatcagcttataaaccgtcacctgcttctcctgcccgatacggtgggcgcggtctgtcgcctggttctgcgccgctacattccaccatggatcgtaatggattacgatatcggccgccgtcagattaagtcccgtccctccggccttcagggaaatcaggaataccggcacctgatcgcggtgaaacgcattaaccattttattccgctcctcctttgtggtggaaccggtaagaagatagaatggaatttcttcttttttcagcctgtttcctataattcccagcatcgaggcaaactgggagaataaaaggattttatggcctgattctgcagcagagagaagaagggagacgcaggtctcaagcttggccgactcaccgttataccgttcgaaacagagggacggatcacagcaaagctgcctgagtctcgtaagctctgcaagaatctgaaatttcccggacgtttcagccgtcttttcatcctcctcaaggctctggcggagttttaaggccgccgcacggtaaagctccttctgctttccttccggagccgaatagacaaccttttcgagcttcaccggcaattccttcaatacgtctgatttcagccttctcaggataaatgggcgaatcatcctgtggagattctcaagagcctcttcatcctcctcttttacaatcggtatctcaaacatggttttgaacttgcggtaggtaaacaaaaagcccggcatcagataatcaaaaatgctccacaattcgctgagtctgttctccaccggcgttcccgtcagggcaaaccttgaaattgctttgactgctttgactgctttcgcactctgagtagatgcattcttgatatactgcgcctcatcaattatctcaaatcggaacgtatgctccatataataaggcagatctcgtttcagaagatcgtaggaagtaaccacggcgtcatactcatcaatctgttcgagttccttctgccgttccgcctgcgggccggtcaccagcagtactctgagagaaggcgcaaaaatggaaaattcatgtccccagttataaatcagggaagccggacaaattaccagggaaaccgacggctgcgccatgcccgcggctgtaccgcaggcacgctcttccttttccgctgccagcagggttatcgtctgaagcgtttttcccaggcccatgtcgtctgcaaggatcccgccgaaccggtagccgtccagcatcttcatccagacaaaaccggccttctgatattcgcgcagaaccttcctctgttctgccggcggttcatacccgaccgtctcagatgactgcaaatccctggcaatcgttttaaacaagctgtctctggaaaatggaatatgcccattttctttgaccagactttccagataaaatgcccggtaagccggcaatgatatcattcctgactgcagctcattctttcccagcgccagaccgtcggtcagcttcaaaagggtcaaaagaccgtcgtcggtcagtctcagaaaatctccgtttttcatccggcagtacttctttttctgtttgtactccgaaagaatccgcattatctctgaggtattcatcccttccgcatccactttaagattcagccatccttcatgaaccgatacgcccagggatatttggggcggagccagaaccttcattgatttgacgctgtcggagacccatacctcccctgtttcaccaaaccggtcaatgccttcgctcaggagacggtaaattgcatcctcatcgtcacgtatgacaagatattcaccgttatcttccctgtattcaaaatattttgtaatcaggcggctgacccggaattcttccggcacgtccctgcatatctccttcggtattttttcatcctccagcggatgaaaagaaaaatcaccataggagagaatcggcttcatcgtaatttctcccggctgtctgctgtcaaattcaaatctggcctgcaattctcccggcctgtaataatcccagtcaatccccccggactccaggattcctgacagatccagctttttcaggactctctcataaaaaagaggaatatcccgctcatttacgcttaccttccgcgctccccccggctcagacagtatctgtgtgagaaaaatagtcaggttttcagtactctcatcatcacagcagtaaagatgggtttcatccgccacatagaggctcttctccccctgaaaaaccatcagttcgtccgggatcctgatctcaagcccttcccggccaatcctctgagcccggacacgaatggccggtttgccccgtaaaaatttaagccgcgttctgtgccccctgcaggtctccgtctcgatttccctgccctccacaattgcaaaaaaacggtcgcaggccgaacggctgagtaacagtgtattaagggccggtgccgcagcagctgtcctctttctgatatcctcataatgctctttataggcccccgtctcttccataaccatctgcaccagaggcctgctttcctctgaaaatgccaaaaggctgtgttcaaatgcaaagccctttccgtattcgactctttttcccgttctgaccgcgtcggcaaaagctcccaaatcctttatcagatactgcctcttccccctgatccggcattccagggaaactccgcggcggctgataatcaggcaggggacaaactccacaaccggggccgtttcctctcccatgatgcgtgcaacctcccggtttgtatattcacgtatcatagacctcaccgcaggggaggttgaaacgggaagcgcattcatttcctgctccctgagccggtactttttaaacagctcaagcccgtgttcacaaatccccttatatgaacttccgtaagggcaggaacagtgataatcataaatttcaccgtttttaataaaaatccttgttctgtatgagccttccccgtcttctgctactgcctggacccggacttctcctttccagaatgtgtctaccgtcatatccctgatgctcaagatacccctccaatagctgtctgttccaatcggcaaaagcaagctccgaaggcttttcaccgtcaaaaaggcagctctccatattcagacaggcggctcccggaatggacagccgcctgtttcaaattcacttgattacatatgctccggagattccatccccagaagatccatacaggtgtccagaatctcttttgtcagcgtaatcaggctgataaacgacgcctgcttacaggcatcctcctcagcaatgatcttattttccagatagaaattattgaatgcatccgcaaggtcggccatgtactggcaaatcttatgcggagcggtctctgcaaacgcggtttcaataatctcgccaaaacggcagagttccagctgaagctctttctccgatacggactgtgccggacggatcggctgcctttcagcatctttgcctttcagctcctcatatttttccagaatcgatttaattcttacaatcatatactggatatggggaccggtattgccctcaaaggaaataaagcgctccacatcaaatacatagtctttcgtcgcctgattagagagatctccgtatttcagggccgcaaggccgataatctcagcggtgcattccatctcattctccggaaccttctgtttttcctggatcttcttataaacttccccgttaatatccctgattaactgctccagacgcattactccgccgtcccttgtcttaaacggaccgccttccttgctgttcatcgtaccgaaaccgaggaaaatcatctgtgtatcttcttttactattcccgctttctttgcgacacggaatacctgaacaaaatgcagttcctgacgcttgtccactacgtagatataacgatccggctgatactctttctccctctcaataatggttgccagatcagaggttgcgtaaagtgaggcgccatccgatttcctgacaatacaggggggatattcttttgcgtcgccttcctgcgccacgtcaacgacaagagcgccctcgctctcataggcaagacctttctcaatcaaatcgttaatcaggccgggaatatacggctgggcatcgctctcacctttccaaaggtcaaaataaactttcaggttgtcataattctttttcaaatcagccagtgagacattcatgatatggttccaaatggccctgtatggcttgtagccgttctgaagcttaaaggtggcctcctgagccctctccttgaacgcctcgcctgcttctgtcttttccttcgcttttgcgctggctgtcggatagatctcctccagctctgatatcgtaaacggcgcttcctccgggtattctccctggaaagtctcatcaaaatagacaagctccggctgtctgtcgtgaagctcctcgatgatcagacccatctgaagcccccaatcgcccagatgaacgtcgcctatggtcttgtgccccatataacggcagatacgtttaatgctctcgccgataacggcagccctgagatgccccacatgaagaggcttcgccacattggccccgccgtaatccacgataatcgtctccgggtcctttgcttcctcgagaccgtacttctcatccgaggccatcctgttcacatatccggcaagatactccggattcaggcggatattgataaagccgggcataacggcattaatctcagaaaacatggaactgtctttcaactgctccaccagttcattcgctatatctatcggtttctttttgtaagctttggccgccgccatggcgccgttgcactggtattcacagagatccggccggttagacagggtcacacggataaatttttcgtcgtatccgcagccggtaaaagccggctttaattcctctatgatcaaatccactatctttttcatcaggttactctccttcttgtattgcctttgctttcggtacagccgtccattccgctgtctcttctgctttttctatgtttaagcgaactttaacgcatcgctttttttacatcttttttaaactgcttccaggctccctcatcctccgagaagttcttggggcatgcctttcccgttacatcatagtgacgtatcacatcctttgtggtcaggtccagctctttacaaagccatgctgtcagttttaccagggattcatacgtttcctcggtaaattctccgtcctcgccgggatggcagcattcaatcgaaatcgtatccgaattgcggttattggaagcaaacgacttctcgtctaccggtatacactggataatctctccatccataccaatgataaaattgctgctcaccgatgttgtattgctgccgctctggtttttcaggctttcaaaataatccctgttctgctgggctgtcgttcccgggttcccgatatagtgaacgacaatggagttcaccgccgccagcttggttcccggtctcgaatacggatttaccgttaaaaactgctggtcaatccactccggcgctttgatggcgctcaaatctatggccttccgaatcgttgtcccccttaacagccatccggttcccgttcccaggataaatgcaacaatgccgatgacacagcggataatgagtctcttgcggatcagctgcttccgcctttgctcctttgcaacggcagatcggcggctctctcttctctccctctccatccgttcttctcctctttcgtacttcgtacaaagtaaaaaagaactgctgtaaaatctcgctcgtctcctccggatattttacagcagctccattttccatatggtagccgttcagttaaactctattacactctggacagatactcacccgtacgtgtatcaatcttaatcttatcgccctgatctacgaataacggaacgtaaacggtagctcctgtctcaacgacagccggttttgtagctccctgagccgtatcacccttaaagccaggctcagtatcggtaatctccagttctacaaataacggaggctctacagagaatacattgccgttgtaggaacaaaccttgcacatttcattctctttgacaaatttgagagcatcaccgattgaatccggatttaatgcaacctgctcataagtgttcacatccatgaaatggaacagatcaccgtctgaatataaatactgcatgtccactctgtcgattcttgctgccgggaacttctctgtcggtctgaaagttctctctactacgccgccgctcattacatttttaattttagttctaacgaatgcagcacctttaccaggttttacatgctgaaattccataatctgaaaaacgttgccctcgatttccagtgtaataccgtttctaaaatcgcccgctgatatcataaatgatactcctccttaaattctctgttgatcttttttattttatactataataccctgtttttcaactactttttgacgattcacgtccatttgcgtctgaattgcgctgcaatccggccattaatcaactgccttcatataccggcgtgtctttttcaagtttttcaatcattttcacgacgtgtgaaatatcaattccgtcaacttccacagactgatgtgaactttccatgtaaatcggattacgcttttcaatcagctcctccaccttctgcctgacattgtctccctgaagcagcggcctggaggtgtcgcccttcagtctttttaatacggtgtcggcagacacgcgcagataaacgacgcggcccagctttttcagcagttccctgttctctttgcgcatcggaagtccgcctcctactgagagaatgaggcgttcttcttccttccccctctctgcaaccagctttttcagaagctccgtctccatgcggcggaaggtttcttcccctctctcggcaaagatgtcggaaatgcttgttcccgcttcctccctgatcagataatcggtatccaccatggtaagaccgtgtttcttcgcatacgcctcgccgacacatgtctttccggctcccataaaaccgatcaggatcaggttggccttccttgaggacgccagtctgctggctgcgagacgttcctctataatcgtcctcgcttctacaatcgtatcttcatcgaccttcacacccggattccacagttcataggagatcaccccctggtaaagcagcatattaagcccgtttactgcgcggccgccggctgcctccacattttccatgaactttgtctttgccggagtataaatcacgtcgactgcttcgctgattttctcataaaatgaaggatcctctatcggggctgctcctaccttcggatgcatccccacactggtggactggacggcaaaatatttgccttccggaattttatcgtgatcttccagcgccagaggcctgaccacatcccttcctgccagacggttcacccattccgtcaggtgcattgctttctccttactccggttcagcagatagataaccgaagctccctccttagccatcatataggctgccgcttttccggcgccgccggcgccgatcaggatgcaggctctgtctttgattactatgccctcctcttgaatggagcgaagcagaccgggaacatccgtattataccccttatatccgccttccatcctcaccagcgtattcacggcgccgatgtctgcggcagtttcgtctatgtcctttaaatatttcattaccgtctgtttgtggggaaccgttacgttgagtccaagtatattcagggcataagcgccctctaccgccgactgcagattctcttctttcactttatacggaacatacgccagattaactccggttctctttgcataatggttctgcaaaagcggtgacatactgtgttctaccggattggcaataatcccgcatattttagtttttccgtccatactatctcttcctcttctgaatttttcttttctctctattataaaaatacagcacaatccattccaggcggcgctttataacgatctgaatttcctctttcggatgaatcggcttaaccagtataccgtaaatacctgccctgttggctccgtagacatcggtaaagagctgatcgccgacaaaaagggtagtcgcctcatctgtcttcatcagctccattgctcttttataacctttaattcggggttttcctgctttgaacagataacgcgaagccacctgagcggcaaaggaggtcacccttggttctttattgttggacatcaggcatgtctccatccccatccccctcagtctctcaaaaagggccacggcccttgtatcagccggggccccatgcggtaccagggtattatcgatgtcaaaaattactcctctgatccctctgccgtaaaattcttcataggggatatcataggccgaatccacatattctctgggataaaacgcattaaacatcaggctttccttccatccggtttattctggagaagtttacccagttcttccataaaggtgttgacatccttaaattcacggtatacagaggcgaatctgacataagccacctcatccaaatccttaagcttgtccatcaccagctcaccgatggccgatgtactgatttctttctcctccatattaaaaatcttgttctcaatagcatcaatcacagaggcaatctgctgcggagataccggccttttgtgacaggagtggagtacgcctgcctcgatcttggcccgatcatatacctccctcgaattatctttcttaattaccattaacgggattgtttccagtttctcgtacgtggtaaaccgcttgccgcaagtctcgcactggcggcgacggcggatggaactgttgtcgtctgccggccgggagtcgattaccttcgtatccgctgcattacaaaatgggcatttcaaatatttttcctcctgacacgaataattgtgtttattttatcgcaacgggtcgggatatgcaagtgttttatccagaaaattaagcaggtgaggacgctgccgggacggccagtggacggggtggtggggtgtgtatgagtcttttatcccgggaaggattgttgtgagttgggactgcggagaagatatagtctgcggagcacgttttcactccatggaatgcatagcggctgctagactcgaaaacacctcgtcaagcaccgatggattccaaaggcatccgcagactatatcttctcctccgccccaaaggcagactttcgccgggacgaaagacaccgccagaggtatcggccccgtccactggcctgcggccgctgattgtctcacgcattaagtaagggggcgggccttgtcgcggccactcagcctttccatgtgcgcggagcttaaatctcattctttcttctccctcagctcaacaagaataatgtcgtcccctatctgtttaatgtcacaaaaaggaatcacatattctttttcatgtcctaaaaacccccagacacagcccggccccggaacgatgattgcaatcatcctccccgtacagatatcaaaatccacatctcctacaaaaccgaggcgtttacagtcctttatattgattacttctttttgcttcaggtcacagattctcattcttatggcctccggaaagttggttactgttaatatatgtgaaaatacggctttgtgttcctttgcctgtgcctttgccgcaagaaaaaccggatcggaaaaggcacgggattaccgtgcccttcaacattactatatgctattccctgttatcggaaatgtaaattgcggattccactccggccgtctcaccgaatacaacagtcgcagttaaatcatttcccggcagaacagcttcgccatgtacgcctgcatcgatcagccctccgactgcatagattccgggaaccggctctccggccgcatccaggacttccgcgcatgaattgacaataatgcccgtagctttttcatcggctgctttagtgagctgaatctccattcctgataaaaccggaagcagattcttgtcggcagctacaacggcaatgctgtcgatggtctcttctgttccgtcaatttctgcctttacacctgtcacaacgccgtcggcattcatgacaatctctttcacctctgctcctgtctttaccggaatcttcagatcctccacttttttaaccagcgcttcggataatgcctctgaaagactgcctccgtctgccaatgtatagcttctcgccagagatgacccatccttcttttcgactcctgttaatttgattccgaggccttccacccagttcttggcttcctcagcgctctcaacaagaaattccgccatgtcctgattgttgctgttcttaccggccttcaatgtatccgacaggaaagtgtcgtatgtatcgtcaatctctgcttcaaactgctcggccgtctccgacgcattgataaaatcttccttttccttcatatcggctgccagttcaccgctgccgctcagaatcagaatcttagacggattaatcccatcctccgccgcctggatggccgcaatcagccctgcgccgtttcctccgaggataacaagctctttcttctgctcttctgccgccgtctcagccacagcctcggttgacggagcctccggtgccttcgttgtctcttcggttgacggtgatgttggtgcggtattattgctgcatcctgtcatcgctgccgcagccataactgctgctgaaaacagggcaagtgtttttttcttcatgtgatatgtctcctctctttgacagtcctgttaaggaatctgcttctctatgatacgttcaaaacaatcgtcccaatatagagcctgctgcttttaaccatatcagtactacagtctagcatagaatcggcggcaaatcaattgagctttttttaattctctgaggaaaaatggaattctttattaaatttctataaaaacaactctgccagctcaaaatggcagaagacgccatggaaaactttaccttaccgcaaaggcggcaaggcccaaagagcaatcgtctccgggccttgttccaaactctctatattcaataaccgccgaactaacggcacaaatccgtgataacctgggcaaatatcttggcgctcaccagcagctcgtcaatcacggcaaattcatccgccccgtgcatcctgttatccgtctccggcatagcagcgccaaaggcgacaccgttctttaaactgtgtacataggttcctccgcccatcgattcacaggttcccttacggcctgtatatctctcatatgccttcagcagcgttttgacaaaatcggaattaccgtccacataatgaggaggcgtcatcgtttcgttcgtcaatgtaaacccgtgttccgccagtctcctccgggcaggctccagcacattctcctcgtttgcacaaatcggacagcggctgtcaaaggttgcatccaggctgtcttcacttacctccagaagatcaaaggccagtgtcagcgcgccggaaagttcatcttccattgcaactcccagagcctcgcctgaagtgtcatgataaggaaacagctttacaaggctgtgaagcgcctcaatctgcgcacacggtgcaaaaggaaggcggctgatcaggagcagcagcgccgtcagggcgttctttccctcagtcggcagcgacgcatgggctccttcaccgattgctgttatctccagcgtatggtttctcccctgtatttcgaatgatacgcctgtctctttctccacttcggctccggtatcgcggacaagattatcatccaggccttcaaatacggcaaatgccttacccggaaccacattcgccttcgtaccggcttttattgcgatgactcttgcgacggcatctgacggttcaaattctgccgtaaaatgcccctgaaggctccccttttctatgttcacaacagggaaagagccgtccggtgaaaatgtcatcggggcttcttcctcaacgtcataataatggcggatatcggaactgccgcactcctcgtccgtccccagtatcagccggacatttttagacagcggaatccccagttcttttacagcgcgcatcgcatagagagccgcaaccgccggccccttgtcgtcggccgttccgcggccgtaaagcttcccgtccttctccaccggttcaaagggctccgttaccgtccatccctctccggccggaaccacatcgagatgggcaaggatatcgagctgcttttccttctcgttcaaatcggctgttcctacataattgtcgtaattattaatggaaaatccatatttctcggccatggacagcgccagggcgagtgccctgctggctccctcgccataaggttttccctcctgataagctgttttctcgctgttaattctgcacaggagactgatatcatcaatcatttcctgtctgtgggcgtcaatatattcttcgatatgcttcttgtacattgtctgtcctttccgctatttcagcaattctgccagaacctgattcacaactttgccgtcggccttgccctttaccttcggcatcaggactttcatgatttttcctttgtccgatggagccggcttttcaatgccaagttcggagagaacctcctttatcacttgggcaatctgttccccgctcatgtcttccggtgcaaaatccttataaacagccaggcgagcttctgcctccgcacggatatcgtccctgtccgccggagccagctcgtatgtctccctggtctgtttgatttcttttttcaccaccgcatcggcttcttcttccgtcagaggctcccgcttatctatctcagcattcttgagagcggaaagaagcatggaaagtgaatcttttctcgccttgtcctttgccttcatagcctctaccatcgctgcacgtacaacatcaatcttactcatcttcttacctcctgcgaaatttttttcagaaaaagttaagtctaaagctgtgtaatcggggttttaattattgcggccgaattcgctcagcttaagacccggattgcgatccaggaccattccgacgctccagctgttaataaacagcagcagcggattatctctgagatctttaatcctcttcatatcggatgtaccctgaatctttgccacatccagctcatccttgttttcaatccagcggatatactcatagggcagtttatccagccttacctctacgttatattcattctccagcctgtaggtgagaacctcaaactgaagcacacccaccacgcccacgattatctcttccattccggtattaaattcctggaatatctggatagctccctcctgggcaatctggctgatgcctttgataaattgttttctcttcatcgtatccatctggcgcaccctggcaaaatgctccggcgcgaaggttgggatgccctcaaactcgactttatctgcccctgtacagagcgtgtctccgatggagaaaattccgggatcaaatacgccgataatatctccggcatacgcctcctccacaatcttcctgtcctgggccatcatctgctgcggctgggacagacgaatcttgcggccgccctgcacatggtttacctccattccggcctggaactttccggaacagatcctcatgaatgcaatacggtcacggtgcgctttgttcatattagcctggattttaaatacaaaggcgctgaaattattgtcaaacggatctacaataccggtcgtcgtctttctcggaagcggtgacgtcgtcatctgaagaaaatgcgtcaggaatgtctccacaccgaaattcgtaagggcggaaccgaagaaagcaggcgaaagcttgccctggcttaccagctccatgtcgaattcatcacttgcaccgtccaacagttcgatatcttccagcagctgctggtggtaatccggtccgattatgctgtccacatcttcgctctcaattccaaactcccgggcagccacttccttctgacctcccatggctgctgtaaaggtagtgatatttttcgcatttctgtcatagacgcctttaaaattctttccgcagccaatcggccagttgaccggacacgtttttattcccagaacgctctctatctcatccatcagctcaaacggatccctggcctcgcggtccatcttgttaataaacgtaaaaatcgggatattgcgcagaaggcagactttaaacagcttgatcgtctgcgcctcgacacccttagacgcatcgattaccataacggcggaatcggcagccatcagggttcggtacgtatcctccgagaagtcctgatgtcccggtgtgtccaggatattgatgcagtatccgtcataattaaactgcagtaccgacgaggtgactgaaattcccctctccttctcgatctccatccagtcggaaacggcatgcttggccgcttttctccccttgaccgtacctgcaaggttgatcgcccctccgtaaagaaggaacttctcggtcagcgtcgtcttacctgcatcggggtgggaaatgatggcgaaggtacgccgtttttttatctgttctgttatattctccaagagtttttcctccaaaaacaataattcaatttattttgccatcgaaaaaatagacatctgtataagatgtccactttattctattatgaaatataaggaaagtcaacaaaaagtcttgacattcaatatccgccagccgatatttgcaaaggagccaaaaaaacaacttccaggcctcaaaacgattcaagccactttcgcgccagctccggccaaatctggcagcacggaacaatgtagctgcccctgccgtcatccgccgtcttatccgtctcctgcgctgcaagcgccaggccgtgcctgccttcagggaaaatatggagttccaggctgatcccggcttttttaagcgcccaggcaaatagaagggtgttctccaccggcactgttttgtccatgtccgtatgccatataaaaacgggaggaacctgttttccaacctgcttttcaagagacaggaactccctgtcaacggccgcagtcccgcagcctgtcaggttgtcaaaggatccgctgtgcccatattccccggacgagatgaccggataggcaagaatcagtcccgccgggcgtatatcttccttactaaggcccgtcttcatcaaaagaaaatcgctgtcccagaaaattcccagggatgccgccagatggccgcctgccgaaaaaccgcacagaaaaatcccctccggatcgacatgccattgctccgcatttctgcgtatcagcgatacggcagtggccagctcacagagggcctccgggaaaatgctgggcgacgtactgtaatgaagtacaaatgcctggcagtccatcgccagaaactgaaatgccgccggctccccttcacgggtggaacaaaactcataaccgcctcccgggcagataatgactgctttcctgcgtgcatccggctttccgtccgtattatctttcaaaaagcaggttaaaagggcctcgccgctgcgctttttgcagcttccctctttgcctttacctgccgcttctccggccggaacctccttaatccggattccggcgccgttacctcccgtcctgatcagatatttttttaagaccatcttccacactcctgctcttaggccccggtctcaccgggttctgtaaattaccaccattgtacaccgcgcccagcgaacggtaaagcagaagttcagccgttcagttgagggcggcggcggacggggtgaaacggcatcttttccgtttctgtgcatcgcgaagcgtgttattgtccgcggaacgccgattttgggcttgaacagtaatcattcggaaagattcgctccgattcccctgtttgcatgattgtttttccatttaaaatattgtatactttcagtagtttcatatatagtatggattaattcattttaccgggttatttaaataagacgaaggagttttttgcatgattctggctatcgatatcggcaacacaaatatctttattggggcgatcgacaataaaaaaacgtattttgtagagcgcattacaactactattggcaaaacgaatctggaatatgccatcacactgaaaagtattctggaaatctatcagattgaaccaaaagagattgaaggaggcatcatatcttctgtggttcctccgttaaaccgcacactaatatccgccgtcagaaagattaccggaatctatccgaagctggtcggttccggtatgaagacagggctgaacatcctgatggacaatccaaagtcggtcggcagtgacatgatcgtcaattccatcggcgcccttggcgaacacgaaccgcccatcattatcatcgaaatgggaactgccacgaccatgtcggtcattgacaaaaacagccgttatatcggcggcgccattcttccgggtctgcgcgtatccctagacagcatgagttccaacacggcccagcttccgcgtatcagccttgacacgccgaagaaggtaataggaaaaaatacggtggattgcatgagaagcggcgttattttcggaaatgccgcgatgatagacggaatgctgtccagaattgaagaggagcttggcggaccggcgaccgtaattgccacaggaggcattgcaaaggcggtgctgccgctctgcagccataacatcatttatgacggcgctctgctgctcaaagggctgctcgctctgtatgagaaaaataaataataaataggggtttgctctgaggctattagcctctgatactggttgcgtctctaggcacttttaaagttcacataacgtttccggatgttctatgttgaacttgctgccattacttccatgaagggcttcctcgaaaaaacagaaaaaggctaccggatacagtcaccggaagccttatggaaaattgcgcactctgacgaaggcgcataaattaaatttcattcttatcggacttctgcccttcatttttgggaaaagcccctgcatagaccgttatatccggttcaagcccctctatttcgacatgcattttaactgttttatcttctcctgaaacaaacagaacgttcatacccttttttaatgtcaatttttcttctgtccagaaaatattgtaagcctcctccgtagccgctgtcagttcctccgatgtcttgtctttggagccctcatggtagtaaccgagctttacgccatcctgatgggcggtgctgtacgtataccgcatcgttaccgtcgtattctccgatacctccaggaacataaaagccgcctccgtctccttcaggtaagcatcaaaatcgacggatatcacatcccctatgtcatctttaatcgtgttaaatatactggactgtgcatttattaccggtcggacggcactttcctgttctgtcccgctttcggatgccgcacgcgctttcccgccgcaggcagtcatggctaaaccaaggcagataagcgccagcgatagaactgtctttttcattcctctattcctcctttgattgatattatttataacgaggcatccattaccatctcttcaaatatttaccgtaaaaagaaaactgaggtaatgaaactgcggtaataaaacagggaaattcccctcccggcgtcttcccggaatacatcgggaaaataccggggcagaattcccccttgctgttctcagttataatttacttatcctggtccgggcctctcttctatattaccctattattttactacttttaatgtagagcattctttctcgatattgtcaatcttttctctgtccagcctgagtccgaagccgaagggattgacaacgattccgtccactttgcgcaccagttttttcagatcgcggaacttcacaagttctgtctggtatttctgtttcttatcaaatttaccaaactcaatatgatcggtgaataccggataaaacttcattcccttattatctgtaataattgggtaagctcgctcattccggctttcggacggaagcagaaactttgcatgatatatctcggaacacatcatgtcctgcatcggtttcaccgccctttttctggaaagctcctggtagaactgggccgccgcacgcatcagagacggattcacgataatatcgccgttgtcctccggtttctccacaatgctgaacagcgacatggtaagtgattcctgtcccttatcaaccacaatggcttcaaagccgctgcggtataaatcattaaagaagccgatcctctgagccgctctgatctccagactcttaacctcatatccttcccactttaattccttcacaaattcatcggcaaacgccttgctggaaaaaatataagcggccggtttggcgttctccgctcccataaaaaagttatttgtaactctggctgcaactgcaaacaggctgtcacccgtgcgtatcacatccaggatttccccaaaaaccgctttatcttcattctctaaataggattttattaattcattaatggttttcattctattcctccatctgtatgtatcatcagttactcgtactgccatcaatttgtaacagttcagacagcatgaactgatacggctattttactattctaacacagacgcagccaacaatcaatcaactctctgaaaaggaaaattttttcattcctccggccgtataaatcggttcaaattcgtacatcattcatttataagaacgcggtgacatgcatgcctcaaattcatttcaccgccaatcaatgaaagatgcggaggtaaagtacatgcctgtttacaaagtagaaatctgcggagtcaacacttccaaactgcctcttctcagcaatgatgagaaggaagagttgtttaaacggattcttgatggcgatatggatgccagggagcaatacattaaaggaaatttgcgtcttgtcttaagcgtcatccagcgtttttcaaacagcagcgaaaatgttgacgatcttttccagattggatgcatcgggctgattaaagcgatagataattttgatataacacagaatgtgcgcttctccacctatgcggttccaatgatccttggtgaagtaaagcgttatctgagagataataattcaatacgtgtcagccgttccctgcgcgatactgcctacaaggccatctacgcccgtgaaggactgatgaagcggaacttaaaggagccgaccatctgcgaaatcgctgatgagatcggagtcagcaaagagagcattacctatgcgcttgatgccattcaaagtccggtaagtctttatgagccggtctatacagacggcggcgatcctctctatgtcatggatcagcttagcgataagaaatgttctgaggagcactggatcgaggatatttcactgaatgaagccatgaagcggctcccggagcgggaacgccatatcatagacatgcgtttttttgaaggcaaaacacagaccgaagtggcggaagaaatccatatcagccaggcccaggtcagccgccttgaaaaaagcgcgctgaaaaatatgcgcaattatctcagttgacatcagagggaacgaggtaaataatagattgagcggaattaaggccggaagaatatcaccggttttaattccgctcaatttggtgtggtatggtgtagtttcagtatttaactgaggttgggaggacgcgtccgggacggaccatttccggtgtggtgagggattctgtctgagtcttccgtccctgtgggaggttagtcgtggagggggaatccggccggaatgaattgctgcggggaccgtttgcactctttggagtgcgcatcagtgctaagctcgtgaggaacctcgctaagcaccggcggactcccatgtcccctacgcaattgattccgcctacttccccgggtcagttttcaccgggacggaacactcaggcagaggttttcgacaccggacatgctccgttccggccgctgattgtctccaaccttaaatgagagggccctgtcgcggccactgcgtgtttactgcaggccgatatcaaatcctccacaattttttataaaaagtgtattgaaggcatatcatatttcccacacacggtagcactgagtggcctcgacaaggtccgccccccgcacttaacgcgtgagacactcagcggccgcaggccagcggacggggccgatacacccggcggagtctttcgttccggcgaaaaccttccgggagaaggagatactgccgacatcttccggcggagaaggagagaatgatatccggctccgccctgcgaaaacaaaaccacagtatctccttctccatccagcgatgccacccccccgggacgaaagactcatatacacaccccaccaccccgtccgctggccgttccggcggcgtcctcacctgcttaactaaatccccagataacaacgtatcaccaatctactcgattgacacatttccccgcttattttatactggataatatgatattctttaaggctgtatcacaaatcagccaggaacctgaaccgatacttgagattaaacaactaaaggagtaactattttatgaatccaaccacacaatcacgttccccctactgggatattgtaaaaggaatcggcatcattgcgatcgttctcggacacagctgttattttgccgtaggctttgtctatctcttccatttggcgctgtttttcttcgtctccggctacctgtacagcgagaagaaatacggggatgctccctttgcctttttcggcaaccgctttgccggaacatggccccgatacgttttttatacctcctgcttcgtgctgctccacaatttctttgtaagccgggggctgtatcagaaccaggagctgtataatcatacaaagatgctggctcagatttgtacaaatatctcctttaccggttcggaaccggcacagggagcgctttggtttgttcccgcctggctggctgcatccggcctgttcggcggtaccgtttggttcggccgtaccgtttcaaaacgaatcggaaggccgggactcaaggtatggctgattggctttgcatgtgccgccgtcggcgccgcaggagtattcctgaacatgagaaaggtgggaattgcctataacctgcatgcttcctttgtcgtcgttcccatctacttttttgcctacctgctgcgctgctgctgttccgactttaagaaatacaccacctggtacggatgtgtcatcagcgccggtatcctgtatttcatcaacgcaaagctgggaatttatattctgcttgacggaatggtgataccgggcttatggttctacgtcatctcgctgatcggaatctatttttgtctctcacttggaacgctgatggaaaaatcaggagcggcatctaaattcctgtcatttctggggcgctactcctttgagattatggcaattcattttgccgtgttcaaatttgtagactatgcctacgctaaattctggctcagatcggttcccgagaatctggccggtttcccgaccggattctcccatgaactctggccgctgtaccttatcgccggaacactgatacctgcttttatcggatgggtttctactcgtatttcacgatttcttttttcaaccgcttcataattttcttttcaagcctggagatgtaggactgggagataccgaggaggtcggctacctccttctgtgtcatctcatcctcattctccgttcccagaccgaagcgcagctccacaattttctgttctctcggattcagcctgcttatagccgtgtttaaaagacttttctctatctcatcttccaaatcccggtatataacatcttcatccgtgcccaggatatcggatagcagcagttcattgccatcccagtccacgttcagcggctcatcgatggatacctccatcttcgtcttattgttccgtctcaaatacatcaggatttcattttcgatgcatcgtgacgcataggtggcaagtttgatgttcttgtcaatattaaaggtattgattgccttgataagtccgatggaaccaatggaaatcagatcctccacgccgacgctggtattgtcaaatttcttggctatgtagactacaagcctgaggttatgttcaatcagctttgattttgcctgggcatccctttccgttcccagttccttcaggacctcggcctcctccttgctgcctaatggagccggaagaatatctgcaccgccgatataatggacttcgccctctttctgaagaaaaacagatttaaatgtcggaaccatcttgagacggaattgattcggtactgctaactttataaccatggtttctttcctccttaataaccatatcttttttattctcatattctcattacatgataccagggtcaaaaggttggaaatctgatgcaagcttgcttgcatgaagatttttaatcttgggacatccggtctttttatacccaaagcttttcattcagcaatatctgataggaatcattctgtgacagtttctcttccgatattgcgatatacggtttttctatgatttttttctgtccttctttttcaatctccatcctgtctgccctgacagccggtaaaatcccgctgtcctttccgaccgaccggaaggggacgaatataaccgcattaacggtcccgaacagctccgtacagctggcagccgatatgacgctgaccggattccccgtataaggctctgtcagccggttgcccgtatcgagaaacccagtaaagctggcctctctgccctgatactctatcaggactttgtataaatgaccgttgcccgccgcgctctccgataccatcctccacagatacaatgttaaaatgatactgaatcccactgccgccgcataaagatagatagaggtatagaagccgccggcccggaacagttccatcaaacctgccagtatcactgcggacagatacaggcctgccacaattctgagaagcgctctcagatccttaaacttaaatgccagagccgtcatcagtgcgctggccgcgcaatatgtaacaattgactggagaaaaaaaacaggaaagggaaaaatggtcacagccagcgcgtaaaaagctcccgccatgctggccagaaatattcctccctttcgtgtctccagcttcatcactttttttacaaccgtgagaagcaaaaaatctattgtaaaattgttggccaacaccacatccgcataaacgttgtatgtcaccgtaaagtatctcacccctctgtctgacggtactgtgatccggtctgcaaatttcccccgaaaccattttcaggagcgcattcaagccggactctgacctgacagtagtcattataaattcccgggcttgtgttttttgtcaaatccggaaagttaattcctgtttttgatcgtcatatttcgaaatgaactgcgtatggaggttcccggcctttccagcaaggaatcgttcctgatttttgccgttctccttttggttacaggctctcttaataaatgacgcagcgccttgcactgttgtaaaacgtaaaaaaagagacagaaacctgctctgcgggtttttgcctctttttttgtcttcagtatattgttggatttcattagaaaatgtcgaataggagagggaaatctgttattgcaccaaaagagccgcagtgctcatgcactgcggccaggatgctctacattctgctgtttattttatacggaccgataattatttcttatttttcaggaaatccggaatgttaatctgggtttctctctgcatcggacggtatggctgtaccggcgtggacggctgagcaggagcctttggctgctgcggtacggctgcggaaggtgccctgtaagtaggcgccttataggttggtgtggatgttgcggccgtttccctgcccgctccctgaggagcaaaggaggctgccggttttgccttgaaaggcgttgtaaactcagtcatggcttttgatacaggcgtgttaaccccatgggcatccagaccggttgcaatgactgtgatggtcgcttcatcctgtgcattctcatcaaacatggcgccaaagataatattggcatcatctcctgccagctcctgcacataagttgcggcgtcgttagcctcgatcaggctgatatcaccggaaatattgataataacgtggcttgcgccttcgatggttgtctctaacagaggacttgccacagcctgtttaacggcttcgatcgctttgtcgtcacccttggcatgtccaataccgatatgtgcgatacccttgtcaatcataacagtctgcacatcggcgaagtccaggttgataaggcccggaacattgatcagatcggttataccctgaacggcctgctgaagcacctcatccgccttcttaagggcgtctggcatcgtggtacggcggtctacaatctcaaggagtttatcgttaggtattacaatcagagtatctacattggcttttaacttttcaattcctgaaagggcattgcccatacgtgtcttggcttcaaagcggaacggcttggtcacaacgcctaccgtcaggattcccatatcctttgcaattctggcaataaccggagccgcacctgtacctgtgccgccgcccataccgcaggttacgaataccatatctgcacctttcagtgcctgtgccagctcttcctggctctcttccgctgctttctcgccaatctccggcttagcgcctgctcccagtcctttggtcagcttttcgccgatctgcatcgctgtagatgccttacaaaactgcagcgcctgcttgtccgtattgattcctataaattcaacacctgcaatattctcttcaatcatgcggtttactgcattatttcccgctccgccaacaccgattactatgattctggcagaattctctgattcatttattttaatctctaacaagatagttcctccttcacttatccatctgatcttgtttatctttataatccgcagccgacggcgcctgtatacattacctttattactgctgccgaacagctacaataatccatctctgttctgggttatcaaaatctagtctatctaatactatatttgattttccgtaaaaaatcaactgtgaatttcataaaatattacttattttgtttttgtcggatccttttaatcgtttatcctgtatgtttttagcggcccgtcttttaatcatcctgttcaaaacggtatgatgggtttgaattggtttcatcatacgtatcgaggtataatgttccgtcaagcgctgaatacgtattgagaatatccctcaattccgatatctttccgttcatctggacattgcttcccagctccacctgcagttctccaacggtaagtgttgcttcccgctggctgttaaaatgaatccgctccgcctttatatcatacatctcaagaacctgggtcagattcagaatctcgtcaaaaattctggcatcctccacaggcagcggtttgtgcagaacaatctggccgaagcgcagcccgctgatcatcggaattcccggcagcttatcattggtactctcaacaatgataccgtccttatcgaaatacatcaggctgttcatataagaaacatatccaaccacgcttttttcatatgtgataatctccacattgacaggacttctgaatactattttatagtcttccacaaaaggaatcgtcttatgtggacggaaacgatactgataatagcagtaaacgggatttttgcttaattttgtatcaaaaatcatgctttctatctgctcatccgtatatctctcgttaccgctcaccgtcacgcttttaatcctgacagaaaaaaggacggcaagtaacagcagcacagtcagaaaaattcctgcaattaccagtttttttctgtttttattcactcttctcaactgtgcacctcctgtttacttcccgcccggcggttctgccgctgcaattttatctcactccatatagcggatgcaggcccccatcccggataaatcacggcagatgtcttcatatccccgcataatgtattcacagctttggatgatcgtagttccctcggccatcaggccggccgccaccagcgcggcgcctccgcgcagatcccaggcattcacctcgcacccttttagcagaggacggccctggatttttgcgatatcttcctcgatgacaatttcggcgcccagcttctgaagctcatttgccgttttgaagcggctttcaaaaatcttttcttcgatagtgctgattccgcgcgcacggctcatcacagccatcataaccgactgtaaatccgtagggaatcccggatacggccctgttttgatagacgccgcgctcagccggccggcagctttgagataaataagctcctcttcttcgaagacggcagcccccatctgctttaataccgatgtgaccgtctttaatccctggctgcctgtgcctgtcaggagaatctcccctccggcccctgccgcagccagaagatatgttcctccggctatcctgtcaccgcctacggtaaattcggaatcgtgaaggggaagtccgccttcgatcacaagcacgtcaccgcccactcctctgacggaagcccccatgttattcataaagcggcacagttccactatctccggctcttttgcgcatccgttcagaaccgttttacccgaagcagccactgcggcaaaaatcgcattttcagtcgccccgacgctgggaaacggaaaatcgacaaccgttccgcgcagccgcggcacactggctctgagcggctcatctccctgcccttccctgattctggctcccatcttttcgagggccatcagatgaaggtctatgggacgttttcctatcatgcagccgccgggataataaacctcggcttctttgcatctgcctaaaagcgctcccagcagcataatggaagagcgcatcttctccatctccgccttgggaatggaaaaacgggacagccctgccgcgtcaatcgtcaggctgtgcccatccaggacacagctgcatcccagagaatcaagtatccccatcatacagaacacatcctgtattctggggacattattaatgaccgttatgccattgttcagaaccgctcccgccatcatcggaagaaccgcattttttgaaccctgcactgtaatttcaccttttatcgggcacagccccggacctctatcgcagacaagaaaaacccctcccatttgtcttctatatactatcctatgtgaaatatgaacttttgtgcagctttttatctgattccgtgtacggttcggtgtgaaacggcggttttaccgccgtcccctactgctccagcttaatctggttcgatacgctaagcaccagccccatctccagcatcagaaacagtaccgatgtgcctccataactgataaacggcagtgtaacgcccgtgttggggatcgagttggtaactacggcaatattcaaaataacctgaatggcgatatgcgccattactcccgttacaatcatggcgccgagaagatcgggggcattgcccgcaatcaccatgaaccggtaaatcataaacataaagatcaagatcagggagattgccccgaataaaccaagttcctcacagataatagaaaaaatcatatcattctgcgcctcgggtacaaatcccagcttctggaggctctcgcccagccctttgccgaataatccgccggaaccgatggcatacagaccctgaagcacctggtagccgccggaacgtgaatacataattggattcttccacacattgatacgtcccagctggtaatccttcaatatatgcatattcaccagtatatggccgatataaggagctgcggccagcagccccactccggctccggcacaggcgaaaaagggccacttgattttacatgccacaaaaagcatgacaaacacgataccgcagataataatacccgagcttaagttattcgccgtaaccaggagagccagaggaagagaaaatccaatgataacaagcgtcggcctgagtttgttgattctcgttcccagctcggctatgaaaaccgccacaaagagaatcagagatatctttacaagctccgtgggctggaactgaagcatgcccggcccgaccttcagccatctctttttaccgtgggacgctacgcccagagggctgaacatggtgagcagcatggtaatccaggaaagagcatatcccagcacggcaaacctggcaaaccagtgataatcaatctttgagactatgtacatgacaacaaaactgccgcccgcaatcgccgcctgcctgattgcaaaatacgcaggattatcataatcgagctgcgccttataggagctggcactgtagatcattacaagtccgaacacagtcaggaaaatgattgtgaacaacaggctgtaatcataaaatcgatgcggtttctttttcttctttttccccgtatcaggcattaattcctactcctcatccctaaggtaagcccaaacggtgaaaagtcgtataaacgtccttttcaccgcccacaaagcaactataaaataagagataaatggttacaggccccttacatattctttaaatttcgttccccgctcctcaaagtttttaaactgtccccagcttgcgcaggcaggagaaaggagtacattatcgcccggatttgcataggatgcacatacctggactgcttccagcagatcttccgcatacatgatatccgtaaatccatggcgtttggcacattctgcaattttatctctggtctgtccgatcagtacgaggtaccgtacctttccatcaaaactttcaatccactcatcaaattcggaatgcttgtcatagccccctgcgatcaaaatcgtcggcccgggcattgccttaattgcctgcattgccgcatccggatttgtacccttggaatcattatagtattttacgccaaagcgctcggtaacaaattcaattctgtgctccaccgcctcaaacttccggatcacttcctgaattttttcaagcgggacatccatattcatgctgatggcgactgccgccattacattctcatggttatggcgccccagcagcttcagctcacttatatccacaatctccgtcaccttgctgccgtcattgtaaacaatctttccgtcttccagatagtagccctttttcagtttctcgcggctggagaaatagaccacattaatcttgagcgtttcaccgaattcccggagtacggtatcgtcataattgaggacacaggtatcgccgtccttctggttctttgtaatgctctcttttacctgcgtatagcattccattgtcttgtggcggtccaggtgatccggcgtgatatttaatatcgcgctgacattgggacggaaatccataatcgtctcaagctggaaactggaaacctcggccacggtaacggaagactcctccgtctccagagcatgcgccgtatatggctccccgatatttcccactacgaaaacactgtcataaaacgatctcataatctcgccggtcagcgccgttgtcgtcgtctttccgttagttcccgtaattgctgccagctttcctttggcgcagtggtatgcaagctgaatctcgctccagataggtactcccgcctcgtccaaaacggttacaaaaggagcgtccagaggaataccgggacttatcactgaaagctcaacacctaacagatccgtcctcttaagttcccccagaacgaccgatacctttgcatcttcatcaaagttcttcttgatcttctctgcatccagcttatcatttccgtcataaagcaccacttccccgcccttggcaagaagaagttttgcggctgcaataccgctgattccggaacctgctactaatactttttgactcatcgtccattcctcctataatcctaagtaagctacaaggcaaaggattgccgttataatcgaaaatacggccacgactcttgtctcagaccatccgcaaagctcaaaatgatggtgaatcggagccattttgaaaatacgcttgccgcccgttttcttaaaatatgtcacctgtatgatgaccgacagaacttccaccagatagatcagtcccactacggctatgaaaaggggcatctgcatcataaacgcgctggatgccacaaagcctcccagagccagtgaacccgtgtctcccataaacaccctggcaggatatacgttaaacagcagaaagcccaggagactgcccacaacggctcctgtaatcgggctgatgccgctgttctcaccgatagccacaattgtaaagaaggtagctaccaaaatggtgacactggtacaaaggccgtcaaggccgtcggtaaaattcacaccgttgtctgttcccagaacgataaagaaaagtgccggaacaaaaagccagaccggcataaccaggtattgccccgtgaacggaataagcatctgcgttccgatctcatcagacgtaataatataatacgcaaagattcccgtaataatgatttgcccggcgagtttctgtccgggattaagtccctccgaacgcttcatgacaatctttatatagtcgtccaggaaaccgatgacgccgaatcctgcggtaacgaacaggacggggataatcttcggataatctttcaggtataagagcgatgtaataataatgcttgaaagaattaccagtcctcccatcgtaggagttccctgctttttcagatgggcctgggggccgtcgtccctgacctgctgtccaaatttcagtttgtgaagaaacggtatcactatcggacacagaatcgcgctgattacaaatgcgataattaccgccagtattgtctcatttaccatgtcacacctctaattcttatgtagtctctgccttattattttctatcattctaattttactacatacgaagatagtatacgtctttttagtagaataatcaaccttttttgttctgccgtgaagtctggcgtaacagttcggacaggcagctgctaaggcataatggagatttagccaaggcccggaggacgcgtccggaacggaccacgtccggtatggtgagggggctggctgagtcttccgtcccctcgggaggttggtcgtggagggggaatccggccggaatgaattgctgcggggaccgtttgcactcttcggagtgcgcatcagtgctaagctcgtaaggaacctcgctaagcaccggcgtcctcacctgcctaattatcctccgcctctgttttaggtatcccaagataaggcaatatattttcaaatatgctccccacgacaggagccgctatcgtgccgccgtagtaaattccttccggttcgtcgatcgtgatgagcgctattacctggggatcgtcggccggggcaaagcccacaaatgatgaaatgtatttcttcaggcttctgggaagcttttccgatgtagccgtttttccgccgattctgtacccctctattttcgcattctttccgcttccctcggaaactacctgctccagtatataacgcatcgtgctgctggtctcctccgacaggattctgtctcctaaaggaaattcaaacttgtggacagaacctgtctgcggactcaccgacttcacagccaggtgcggagtcaccctgtttcccccattgataacggaggatgccgtggtaatgagctgcagcggtgtaatctggaaagactggccgaatgatacggttgccagctccaccagccccatattttcctttttatgcataatggtggctgcctcgcccggcagatcgattcccgtctttccgagcaggccgaactgggcaaagtatttatagtaattatctactcccagcctctgccctacatcgatcagcaccggattgcaggaattcatcattccctgaaggaatgtttcacctccgtgccctcccactttatggcagcgtatttttctgtcttccacaacccggaagccgggacaggaaaaattatcggtcagctttactaccccggcctccagaccggccgcagccgtcacgattttaaacgtggagcccggctcatacgtgtcattaatacatttatttctccacatctggtttaaaagatcctgggaagtcttgccgtctccgtccgccgcaatgccgggtatcagtgtaaacggttcatttaaattgaattccggcacatttaccatcgcgagtatttcgccgtttttcggattcatgacaacgaccgatacgctgttggcctgttttttctccattacctggtaagcggcctgctccgcatatttctggatattgacgtccagggtgacgaccaggtcattgcccgccaccggctcaatccggtcctcggccgcattctctatctctaccccggccgcattcgaaagcgtcagtatttttccgtcctggcctttcagatatttctcatactgaacctccagcccgatgataccctggttgtctcctccggtgaaaccaagcactctggacgcaagactgtcataaggatagtaccgcttatagtcctcatcgaccttaacgccggcaagtccctgtgcgcgaatcttgtctccttctttcttgtccacatttgtctttataatctcgcgcgcagaatatttttccaccttttttctgaccgtatcctccggcactcccagttccccggaaagtatccggatgacgctttccggatcctcaatctggttatggaccaccgatatggtacagactgtccggttgtcggcaatcaccacaccgttccgatccagaatccgtcctctggccgctttaatcgtcctctccctctgatgcagatcctcagccatctcactgtaatagtccgctttataaatcataaggaagaacagccttcctgtcagcccggccatgcacaggcataacatgatacatacgaacgctattcttcctctgtgatgtgtctgatttctgttcatgcggtacctttatgctttcgttggtacagtatattaaaaaatcagaattttattcttgttacaacccacgctcggtttattatcgaagtgcggctgcatcctatgcggacacgtggttgacctcatggcagcgggggataccggcttctctccgcccaccgctgccgttaaatttgtttgggcaattcatctcaccaccttagaggatgggaaaatccttgctaatatttgttgaacattattcccggctgccttctgaagactcggtcatacctcccccggtgctttcagccgcattggtgctttcaggcattcccgggctctcctgcggtgcggttaaacctcccggcatgctgtcgggataattgtaatcttcttcccccgaatcaataaactcatcatcaaatgacgcccaagtctccgtcggggcctctgattctccgccttctcccgcgccctcctgtccttcctggctctctgaaggttcgccggatgtgatgccctcttctcttcccgccagatcttcgtcttcctgcagacctgtttccgtatccgggaatacattcatatacggaaggatttccgccatgattttagccgaaatctcactggcaaatctggaatgggcctgttcctcacccggaaggttcggtgtgtccaaaaccacgtaaacgagaacctgcggatcgtaagccggcgcatagccgataaacgataccagataatttttggcttctctcggctgcttctgagccgttcccgtctttcctgccacctgatatcctgccacggccgcggcccctgccgtacctccgtcgccggaaacagtctgatagagcgcattgttaatatagttcgatgtattttccgaaaccgtctctcttaccagtttcggctcattcttcttgacgacggcgccctggtcatttaagattcttctcacaacatgcggctcatagtaagagcctccgttgatcagggaacaatagccggccgccatctgtatcattgtacagttataattctgtccgaaggcattcgttgccaaatcgaccggtcccatattatccgccctgtatacgaggccggatgtatcagcttcacccggaaggtcaatgcctgtcttggaaccgaagccaaaaatgctctggtattttgtaaacttctcttttccttccagacgcacaatattcatcataacgatattgcatgatttcataagcccctgcgtgacggtaagaggcccgtgaccgcttctggccacacagcggatcgtccatctgtcgtccattttctgcctgccgccgcattcaaaggtctcatatcccgtgatggctccttcttctatcgcaccggccacggtaaatgccttctgcggggatcccggctcaaaggtatcactgacgcagaaattacgccacattttataccaggcgtcggcctttgtcttttcatccatggcagcctgttcttcctgggtataatatcggtccatattataaggatcatttaaatcatagcggatgttcgtatccatcgcaagaatctccgccgtattgggatccataacgataacggctgccactttacttccaatgcccgcctgccattcgtcaatatatttctgacagattttctggatattcgcatcaattgtcagttccagcgtttctccgttcttagccggcttcaccactctctccagattggaatcgtcattgagatatccgtactctctgccgttcacgccgttcaggacgctgttgtaatactgctcaactccgccggaggcattgccgtccttcattgcaaagccgatcacgttgcaggccagctccttatatgggtataccctcttgtactcatcttcaaaccatacgccggtgattcgtctcttgccgccctcatcgaccggcagtttcttatactcggcattcttctcctgcttgtaattttcaaacagctccttctgctccgccgtcatctgtttttcataaacgacataatagctgtctttcctgtcattgatcagcttgcgcagctcttcacggtcatagccgaagcactcgttaagcgcatccagcgtcgcttccagatattcgtagttttcatcattttccaatatctgtttcggatcgataatcaggttatacactttctcactgatagccagatacgttccgtttctgtctacaatgttcccccgcttaaaggggatcgttctgctctcataatcctgatggcttaaaacgatctgattatagtcttcccctttgttttttacaatattataaagcaccaataccaatgcaaacaaagccagcgtaattaccaaaacggtaatcgccagcttttcctgcatgtactttcgaaagggctgtttgttattagtgttttgggatgtcctcatactgccttacatactcactttccgttttattatacaaaagaatctgattcttgttggcatataccatgccaagttcttctgtagcgaccttaaatacatggtctaaatcaacgtaagtgtcaattcttgtctgaagggcatcattttcagattttaaatgttccagtttcagttccagcgtttctatattattgattcttgatgtaatcgaagcttgtatatgcaggtaattcatacataaaaacagcgtaatgactgctgctatggtcagagcaaacacatacggaccgtccatatagagagctttgtccctgttcctccgtacaacatggctgcgtttatagtcgtcctgtaccctgcgctccggctttgtctgtggtgtagttctatttacttttctcacggtattgccgtctacatacgttccggcatattcaggatgtcttcttctggcagccataggtctttacctcctactcttttcaaacactctcagctttgcgcttttggaacgcttattttctgaaagttcttcctctgacggtaaaatcggcttgcgtgtcaccacacggcctttactcttttttccgcacatgcacacggggaagtcgggcgggcaggtacatggattttcatttattctgaagcggttcttgacaatccggtcttccagcgaatggaaggtgataatggaaagtctgcccccgggagccagaagatccgtcatcttgtcgatggaattttccagaacctccagttccttgttcagttcgatccgaatcgcctgaaatgtccgcttggccgggtggcctcccgtggctctcaccttggcgggaatcgcggcttttataatttcaatcaattctcctgttgtctcaatctctttttcctgacgtgccctgacaatgtgcttggcaatattcttagcgaaccggtcttccccataatttttgataatatggaacagctctgattcactgtaggtatttacaatatcttttgcggtcatttcatttctctgatccatcctcatatcgagcggggcgtcatcctctctgtaggtgaatccccgttcagccgtatcaagctgataggaggaaactcccaaatccagataaatcccgtcgacctgactgattcccagctctttcaagacctcatcgatattctcatagttgcttcttacaatcgttactttatctccaaattctttcagacgttccgatgcggccgctatggcgtcggcatcctgatcgattccgataaaccttcccttatctcccagtctccggcatacctcgctggcatgtccgcctccacccagggttccgtccacataaatcccgtccggctttatgtcaaggctttcgattgtctcatctaaaagtactgatttgtgtccaaatatcatattccaaggccttccatgttctctgctatttcgtccatgtcgtcatagacattcttctcggtccaggttgctttattccaaatctcgatccggcttcccacaccaaccagaaccacttccttctccaggcacgcaaactccctgagtacggccggaaggagtatccttccctgcttgtccacctcacaggcagaagctccggccagaaaaaaacgtgagaactttctggcattcgtattggtaagcggcagtgactggagcttttcttcaaagtttttccactcagaattatcatacacaaagagacagccatccaacccctttgtcacgacaaattcgtctccaagctgttccctgaatttggaggggacaatcagcctccccttcgcatcgattgtatgattgtattcacccatgaacatagcaatcacctgtcatccaatttgctccactaagcttccacgcggaaccatttagtaccactttctaccactttccaccactttgtattctaattctagtacatctgtaaggaaatagcaagaaatatttattaaaatgtacagaaaaaaagatggtaagatctggaaatcttaccaccttttttaacgactctacatatgtaattttcttagcaatcagctacaacatattgattcagcagctgatcaagctccacactgcattgataaatgataccatactcctcctttttatcaatgcttctattcaaccgttctcttgcatgttcaattttactgatcaattcttctctcgcgtttgccatatcctactctccttttgttgttgctgtcttcagttgtggcgctgtcagaggatatattgtattgtaaaacgtttgcacaaaccggtattccagaccctcaatccaggaatacagtcttaaaataagatatccgatgtcagcaaccgaagcaacatttacaaacaataatgtttgtaaatgcctccccggtgtatcttcattttaagtccttattccctaaaaatcaaacaaattcggccgataatattcgacaaaaagtgacgcatctcccttatttattatccgatccccttataaataatacccagaacaaacacgataattgtaagcggtacatagattccgcaggcaattttcccaaacagggaaggcattgatttcgttctgccctgctccagttcctttcgtatttctttgtaaccaagcacataataaacggaaaccgctcccaataccgctccaaaaggaaccacgaggattgtgataaaatccatccattttcccacggagggttccgcttccaggaagactccgaccacaaagcagataattccgcaaagcagaacggccagctttcgcggaacttcaaaccggtgctggatactttcaattaccgcttcaaacatattaattaaagaagtaatcccggcaaaaaccacggacaggaagaatatgacggcaaatatctggcccatcggcatctggccgaaaatcttcggaatcgtgataaacattaaggaaggaccggctgccggctcaattccaaaagcaaataccgcaggcataatggcaagggcggaaaggagagccgccaccgtgtcaaataacgccgtacgcatcgacgaacctacaatatctgccttcttattcagataagaaccatagacaatcattcctgaaccggtgatggacagggagaagaatgcctgtcccatggccataacccaggtatttacgtccaacagcctttcccactttggcacaaaaagaaaattgtacccggctgaagctcccggcaggaagaatacgcggaccgccaggacggtaaacagaacaaagaaaacaggcatcatcacacggttagcccgctcaatctgggtaacggaacctgtaaccaggataatcacggtgattagaaccaccgccaggtgccagggcaggctgccgaagcttcctgtggcctgtgcgaaataagcggccgaatcctctgtaagaatagcacccgtcagggaacctcccagggagcggagcacccagccgattataatcgaataaccgatcgcaatacccagggaacccataaggggaatccatccaagaaaacgtccgacggcgcctttgcctctgtgggcccagcatagctcataggacccaagggttcctgtctttgcctttcttccgatggcaaactccgccgacaggccggtcaggccgaacaggcagataaaaaagagataagggaccaggaatgccgcccctccgaactggcccagacgatatgggaacatccatatgttgccaaggcccaccgcagaacccacacaggccagaataaagccgagtgaactgctgaaatttccatttttgtgactcatgtaataaccctcctcatagatagtggtgaaaagtccctgaagccaaaaccacgaaggaaccttttcatcgcccgcatacatgcgtctttagccctcccgcctggattcacatgcatgctatgccgctttaaacggcaaaatcagttctatcataatatatactgcggataaaagcaacccgggatggagatttaattgagaatagaggacgcatccggaacggatcggggccggtgcggtgaggttggtttttctgggtcttccgccctcctgttatagattgtctccagtctcaaaggggagataaccttgtcgctgccaatatggatgcgttgagcggccgtaccggcagcgtcctcgcctgcctaattaaatattttctcttccttttccgttcattctatggtattctattcaagtacgtccaaatgtaaaagctctaatgaacttaataagcagtattatgcttatcaataatagaaaggaagtttttattatgaaattaggtattgtaggcctgcccaacgtgggtaaaagtactctcttcaattccctgacaaaagccggtgcggaatctgccaattacccgttctgtactatcgatcccaatgtaggtgttgttccggtacccgattaccgtctcggaaagctctccgctctctataattccgaaaagattaccccggccgtaattgaatttgttgatattgccggactcgtgaagggagcttccaaaggcgagggcctcggcaatcagttcctctccaatatccgtgaggtggatgccattgtccatgttgtccgctgttttgaagatcccaatgtaattcatgtggacggcagcgtggatccgctccgcgatatcgaaacaatcaatctcgagctgattttctccgatatggagattctggaaagacggattgctaagacaaacaaaagcctgatgggcaataaagcgcttgcaaaggagcttgatatcttaaaggcgctttacgctcatctggaggacggcaaactggcaaagagctttgagacggaggatgaggacgagcttgctttcatcaattccctgaatctgctcacatggaaaccagtaatctttgccgccaatgtatgcgaagaggatctctccgatgacggcgcaagtaatgaatatgttgcccgggtacgtaactttgcatctgagacaggcagcgaggtatttgttatctgcgcacagattgagcaggaaattgccgaactcgatgaagaagagaaaaagatgtttttagaggatctcggtcttaccgagtcaggcctcgaaaaactgattgcggccagctaccgtcttttaggccttatcagctatctgacggccgggcctcaggagacacgggcctggacaattaaagtggggacaaaagctccgcaggccgccggaaaaatccattccgactttgagaggggatttattaaggcagaggttgtcaactaccaggatcttctggactgcgggacctacccggccgccaaggaaaagggcctggtgcgtatggaaggaaaagaatacattgtcaaggacggcgatgtaatcctgttccggtttaatgtataaacgataacctgcacgttcctcgcacaggtcgccgccatcaattataaaatggtgccggattcatgtcagctttaacatgaatccggcaccattttcagctgctgtgtcaaacgcccccttaatctgcaattaacaggacaacttaaccgaccttccccattcttgcataaaaagccggattccgtaatagattgtaataaacaaatccggagggcttttttatgagctctaaaacaaaaatagtagtgctgcgcatgaaggaaatcatttacaccgccatctttatcggtttggggatccttctgataacgctattccttatcatgttccatccgaaaaaggacgccgcccagaccgcttccgacagcgtacagtacataccgggagtatacacagcctccctcgttcttggcagccagaatgtcaatgtggaagtagccgtagatgccgatcacatcaattctatcagcttctcccctctcagtgattcagtcgccaccatgtatcctctgatggccccctctatcacccagctttccgaccagatctgtcagacgcagtcactggaaaacctctcctatcccgagggcagccagtacacttctcaggctctggtaggcgcgattcgtacggcactgggcaaagccacggcaaactgatgcgtaaaatccgtaccataatatacgggcgggaacagggacagaaaattccatctatcggcggaattttctgtccctgttttatctgtccgatttttaacacagtcttacggttctgccgattttcattgtatttttatcaatacaatgagataatgatcaatattccggataatcgggaagcggctgcagatacatatcatggattcagccgcatattgtccgggataattgaatcattttattaactgcgaaatacaaacgggggaattattatgaacgaaacggggaattcattcattacaatcgatttggcaaagataaaatcgaacatggaaaaaatcagaaatcacgtgggaccggatgtggagattatgcccgtcctgaaagcaaacgcctgcggccacggcctgatccgtaccagtgactggctggttaaggaatgcgggattaaaagactggctgtcgcccaggtacgcgaagccgaacaactgcgcagggccggcagtcaggcggaaatcatggtactcgggggcgtaccggtaaacaacctgccttatgcggttcaggagaatctcattctgcccgtcttccgcacccaggatgccgctttgctgtccgctctcgctcaggaaaacggaaggactgcccgtgtccatataaaaattgataccgggcttggccggatcggtgtggaaaagggcgagcagctcgaagagcttctggatggtatcttacctctgaaaggcctggaaatagagggagtgtttacccactttggggaagccgaggtcacagacccggagttcaccgagattcagatcagccgttttgaggaagcccttggacaaatccgggcgcgggggattcagccgcgttatatccatgccaccaacactccctctaccgtacggtttaaaaaagcccattacaatatgatacgtacaggccttttgtggctgggatacgatccctgcctcgatgaagataacaggctgggtctcgaaaccgttctggaatggaaaacctttctgacaaataaaaaatacgttttgtcaggcagaagcatggggtattggagaaacttcactgccaagcgtgatacggttgtcggtatcgcctgttttggatacggggacggctatctggaagatttgggcaaaaaaggaggatacgttttaatacatggaaagcgggctcctattatctccgtctgcatggatcagacatttctcgatatcaccgacatacccgaggccgaaatcggcgatacggtaactctgataggtcatgacggcagtgagaagattgatgcctttgatatggaaaagcttacggaaaactcctatgttgtctacctctgcaatatcagcgaacgcccggtgagaatatacagagactgacaatgatccgccttcgacgcttgcctgcacgctccgcgcacaggtcaccgtcatcaattaaagagagtccggtaatccggactctcaaaccaggtatctccctatttatagaatgagctgctgttgcttctatttgtctctttactcaggattcgactatccgctcagttccggcttattcaggcccgttcagaaggcactgtttaaccgcactcaaaaatcctcctgcataaatgctgacggaggccactgcatccgatgcataacctgtctcctgcaaaagaccttcttccgactggttttctatcagatattcggccagcatgtcggcctgctcaaaccacagcggcccattttcggtcatcacgtattggccgtcctccgaaagttttctctttcccgtcccctccttatctactgcgtcccactgaagggctgttatcttatgatccttaacgctcatcgaaatctgatcacagaaaccattttcgtccgcctgaccgctcttccagttgtatgagccgtcggccgcccctgccagaagctcatccaggcttgtatgggaagtatcaccgccggcaataagaagacactttttcaggcagtcgataaaaccgccgatatggatgctgacagtagaaaccgcatccgatgttccgctgtcattcatcagccctttcgtcgtctggttctccatcacataccgggcgagctgatcagcctgttcataccacagcggcccgctttccgtcatagtatactggccgccagcagacatttctcttttaccggttccgtcttcctgcaccgcatcccacgtaagagccgtgatcttattatccttcacttcgatgtcaatccggttataaaatccattctcgtccggctccggttcccggtaagtataagagccgtcggcaattgtctttaaaagctcgtccacttcaggaagcgctttctgggcgttttcctgtgcaatttcctgttcaataatcgccgccagctccgtcccctctttcacggcttcccgcacgcatgcacccatggccgtctttaccgcattgctggtcatcgtggcgcccgatatgctgtccacactgtgagactggtttgcccagatatctttcgagagccgtactgcagccgacttgccaatctccggcgtttcatccggcgcctctactttcacatcttctattccatactccgagaattttgccttcactgtgatcggtccgccgtatcctctggcgcttccttcatatgttcccgcattataaataggaacatccgacacagggaggttccgccctgctatggatttataaagaggacctgagaatgcaatcagccctcctgccaatataatcataattcctgccccggccagtattcccgccaggtttcctgtttctctcttcttcatgtgtccttgaatcctttcctttttcatcggctggtgtttctgatacataatagtgccagacctcaaacattttgcttttagtctggcactgtgttactctttttatacttctctcatcctatatctcatcctgataaatatcggatgacagcggatgatactgctccatggaaattttaaatgacggcgaattctccactgcgttcaggaacgcaggaacatcatcatcaaaatcatacgtccacaatgtctcttccagactgttcaaagtctcatccggcatgtaaagcaggtccagatgtatctgttcaatataatcatattctccatccacctcaatggtaaactgcctgaccattgaaaggaaaaatctgtcaccgtccggtaaatcataaattcctgcttcaaaaagcagactgtcatccgcacattcaaaggagagcccggcaaaccttctgaatgcctcccatcccgtctttaaatccggttcttttgggttaaaaccgctctctttcagaacagccctgaacattccaagagcgtctgaggttttcaatcgtttcggtgtcttcgtcatgtttcattctccttttccctctcccattgcaccatgtcggcaagtgttaccttgtctatgacaccgttaacagcatcatcaaccatggtccacagcttaagcgccgtgcatcccggcgcccggctgcatgtattgcctctgccatccatccgggtatccacacacgctaccggcgccatgcttccttcggtcagtctcagaatcattccgaccgtatattcctgcggttttccggccaggcagtatcccccctgggctcctctgacactattgacatatccggctttctttaaaaccgatactatctgctcaagatacttttccgatatctcctgtctgagagaaatatctttaatcctgaccacctcatccccctgcaatgccaaatccagcatcattcgaagcgcatacctgccttttgtcgatactttcatttccagctacacccctttatatttattcttcaaacagcggagtggagaaataccggtcacccgaatcaggcagcaggacaacgatccgctttcccctgttctccgctctggccgccagctccactgccgctgtcagagccgcgccggatgaaataccggtaaggattccttctgtcacggcaaactttctcgaagccgcaaaagcgtcctcatcctttacctgaatcacttcgtcataaatatcctgcgccaggatttccgggataaatccggctcctatcccctgaatcttatgagctccggctctgccctccgacagaatcggactcccggccggttccaccgctaccactttaatccgggggtttcgctccctgaggtattggcccacaccggtgattgtgccgcctgtaccgatacctgccacaaagatatcgaccgctccgtccgtatcttcccaaatctccggtccggtcgtcttcctgtggacagcaggattagctgcattggtgaactgccccagaatgacggaaccttcgatattttgttttaattcctccgccttctctatagctcctttcatacctttagagccatcggtcaagaccagttttgctccatatgccttcagaagctttcttctctctatactcatagtctcagggagagtaaataccgccttgtatcccttggccgcagccactgaggccagaccgatacccgtattgccggaagtcggttcgataatggtcgctccctttttcagaattccgctcttctcggcgtcctcaatcatggacagcgccacccgatcctttaccgaccccgccgggttcagatattccagcttagccagaagaaccacatccgctattccttggctctccgcataattagacgcctccagaagaggtgtccttccaatcagctgtgctgcgcttttcttaatatccgccatatttttcctccttttgattctgcaatttatatcatagtaaatctataggttttatatgattttatcatatcggaaaaatttgtcaagatttatctgctgcatttagcgcagccgcgataaaacgatactcttcgcgttccgaacacgggccgccaccttcaacgcaaaagccagggcagcatgccctggcttttaagctcttctcccgttaccgaaacgataacctgcatgctccgcgcacaggtcaccgccatcaataaaaggaaagaaataatattcatccgggtaatccggtgtttaaacgataactttgactgggcacttcgccgcgcacttgccgcagttcgtacacttctcataatcaattaccgccaggttgttatccatatggatggcatcatcctcacactgcttgatgcagagtgtacagccgatacatccgttatcgcatttagccttgacagccggtcccttttcatgggaattacactgtacaaggtgttccgccttgtatggcaccaattcaacaaggtgctgcgggcaggcgtccacacatttgccgcaggcaacgcatttctctttatctaccaccgcaatgccgtccaccacatgaatggcgtcaaactgacaggcagttacacaggaaccaaatcccatacatccgaaggagcaggctttatcgccggaacccggaacaacggctgccatcttgcagtctttgataccaaaataattatactgtgattttgccttgtcgcaggtgcccttacattttacgaaagccaccatcttctcactgctgccggcttccacgcccataatggctgcaattttctcagcacagggagcgcctccgaccgggcaggcgtcaacaggagcagtaccctcggcaatggcctttgcaaggccgtcgcaacccgggaagccgcaaccgccgcagttgttgcccgggagttcttctctgacaaggatttctttctcatctacttctactttaaatttctcgctggcaacgccaagcagcacaccgatgataataccggtagcgccgacgataattgccgcaataataattccagttatattcatccttcgtctcctcctttaaattaatccggaaaatccgaaaaatgcaattgacatgagacctgcggtaattaacgtaatcggggatccctggaagttatatggcacgtcattgtattcaatgcgctcgcgcacgcctgccagaagtacgatagcgatcgtaaatccgaccgcgataccaacaccgttgacaacgctctctacaaagttgtatgtcttctgtacgtttgttaatgcaacaccgagaacagcacagtttgtcgtgatcagcggaaggtatacgcccagagactgatacagggaaaccatgtttttcttcaggaacatttctacaaactgtactaaagccgcaataaccagaatgaacacgattgtctgaagatactccataccgaagcgcaccagaatgtgatcatagattaagcttgccactgcagatgcaatcgtaattacgaagattacggccgcacccatgcctgctgatgtctctaccctcttggatacgccaaggaaggggcagataccgaggaactggcttaatacaacgttatttaccagggctgaaccgatggcaattaatagtaattctttcatctatccattcctcctattctgttttctcgggttctttcgccgcttcagcttctgcctttgctttcgcttcctcggccgccttcttggctgcaagtgctttttcagccgccgctttcttggctgccgccgctctggccgcttcctcggccgctttctcagccagcttcagatggttgtcggcacatgcggaacctgcacagcttgcgcagttgccgccgcatgccaggttggactgcggtacggaaccatttgttgcggaaggagctttaaacttattctggagtgcagtcagaatcgcaagcacgaagaatgcacccggagcaaggataaagattgagatatggaaatcctccggaataatctgttttccgaagaatgctccgccacccaggaactcacggaaaataccgatgagcgtcagggcgatggaaaatccaagtcccatgccgattccgtcgaaaagcgaggaaacagcgtcattcttggaagcataagactcggcgcggccaaggatgatacagtttactacgatcagcggaatgtagatacccagtgatgaatagagggaaggcacatacccctgcatcagcagctggacaatggttacaaggctggctacgataacgataaaagccggaatcctgacacgatccgggataatcttacgcagcgccgaaataattaagtttgaaaagacaagaacggctgttgtggaaagccccatgcccagaccgttgacagcagaagtcgtaactgccagtgtcggacacatacctaacattaacacgaaggtagggttttctttgaaaatgccgtttgatatacgttctacatatttgttcatatttcccacctcctgttagtttatgaaattctgtttgcagtacaaagcggcattaaccgcattcgtcactgcgttggatgtaatcgttgcaccgctgatcgcattgatctcggcgtcgcccgcattgccgcccttgacaacagtaagctcggaagccgatttgccgtcatactgggtcctgaacgggtcctctttcgccttaagaccgaggccgggcgtatcgctgatctcgcggaagccgatggaagtaatgcttccgtcgtccttgattccgacggagatagatactttaccgccgtagctgtcattcgaataggagttgattacatagcccaaatcgctgccagcatcatcctttgcaaccattaccgtctcaacgcccacaccgccgaaatccgatgcggcaagctccgtgttgcatgcctccaggtcaatgtctgaagtctcttcaaaagatgacgcctccgggaatactcccctgtatgtcttgttgttagcttcaattgtggcctgttcaatcgggccttttgtcacttcatatacgccgcccagtgcaataccggaaatcagggtgattgcaaaaaggataaaggcgtctttcataaatccggatttacctgccattatttcttacctcccttttttccaaatgcggtcggaagggtgaacttctcgattaacggaaccaggatgttacagaagataatcgcgtaggatactccctccgcagaacctccgaagatacggaagagacctgtcagaagtcccagtgcgataccgaatacaatctgtccctttggtgtgatcgggctcgtaacataatctgtcgccataaagaaagcgccgaagattaagccgccgccgcaaagatgggccaggatgtagcttacgtcaaatccgctgtaaatagccgcaaaaatagcaaccgtagcaatatatgtaagcgggatgcgcagtgtgattacttttctgaataccagataagccgcaccgattaacagtgcaatcacggaaacctcaccgatggttccgggaatccgtccgataaacatagcggtcacatccacctgctctcctgcctttaacatggccatcggtgttgcgctggctactgcgtcggagaaaggctctgtaaatgtggtcatctttcctgcaaaggaaataagcaggaagcatcttgctgccagagccgggttcatccagttctgtccaaggccgccgtacatctgttttacaatgatgatggcgaatacgccgcccaggcacggcatccagacaggaatctggggcggcatgttgagcgcgagaatcataccggttacaacggcgctgccgtcataaacagtgattggttttttcatcagtttttcaaaaatatactcggaaagcacgcatgataccactgttgcaatcagaacaagaagtgcgtgcataccgaactgccatacaccgtaaattgacgcagggagcattgcgattgccacgtcaaacatgattgcctgggtggtgtggctgctccttacgtgaggtgatgacgatacgttaaataattttcccatttcttcacacctcctactttctgcggctggccgccactgctttgcgcagctctttgaatgcctgtgtcagcggtctcttggccgggcaggtatatgcacagcagccgcattccacgcactccatcccgtccagcttctggaatttctccatatcatggcgctctgcggcgtccatcatcatctgcggcacaaggtgctccggacatacgtccacgcacttgccgcagcggatacacggagtcggctccatcgctgcaacctggtcttttgtgaatgtagtaagtgcggaagatgtcttggcaaccgggaagtcaaggctgaataaagcctggcccatcatcggtccgccagaaatcatcttctccggttcttgtttaaatccgcctgctgcctctaacagcctcttgtagttcgttccaagccttacctggaagttttggggatttgccactgcatcgcccgtcactgtgataatcttccgcagcagcggcgtggtattgcagacagcatcataaatagcagccacagtgtcaatgttgtctacaacacagcctgcgtctgccggcagcatggaggaattgatctctcttcccgttacggcgtaaatcagcgtacgctcgcctccctgcggatacttggtgagaagcggacatacctcaattcttggctcgtccttcaccatctccgtcagcttcttgatcgcttccggtttgttattctctatgcctatgattcccttggcattgtcgaacaactgaaggatcactttcagtccgccgataatctgttccggacgttccatcatcacacggtagtcgctggtcaggtaaggctcacactctgcgccgttcacaattacgtgatcaatggcagcctcatcctttggcgtcagcttcacatgcgttgggaagccggctccgcccaggccgacgataccggcctctttaataatatttctgatctcttcttttgaaagcttcgtgtaatccctcgcattaccaaaaccttcaatcgcattttcttccccatcgttctctacgatgatagactgtaccattgcgccattcgccaccagccttggttcgatcccctttaccgtaccggaaacagaacttaatacgttggcggaaatgaagcctcctgcttctgctataatctgacccttaagcacctgatcgcctttggcaaccagtggttttgcaggagcgccaatatgctgggacagcggatataccatctcctcgcccttctcaggaacgatgaactggattggtttatcctcagacagttcttttccttcataaggatgaatgccgcctataaatgtagccaaacccatcaaataaaccctctttctctagtttgattttcgcaccctggatgtgaattttttgtcatattttcgtgaattttttatcagttccagggttaaaagctatcgcgtatagtatatcataggaaaaagtttttaacaattggaaactttaagataatcgaccgaattttgtataaaaattaatacaaaatttattttttttgtaaggtctttcatacagaaacgacaaaaaaagctgccataaatttaccacagcagccctttcttcgtattttaatttaacaattatttccaccttttctactcctgcgccacaggaaaccccacttttgacagggcgtcggaaattttccccgcctgcctgacatccgcctcaaacccctcgttaattacattgtgtatttttaagtaggtgcgcagctcctcctcactgaaaaccgaaagctgcttaagctttcttctgccgcactcctcatccacggcggcatgggctttatagattctccagccgtaatccgtcagaaacaggttgtactccctgttgttgtctttattgcgtttctggaacacaagccccttcttcctcagcttcctgataatctgggagctggcgctgggggttttgttcatcccggccgacagttccgaggaagtaatcccaggcgtgatcccaatccgttcaatcgtgtgggattccacctggtataaaatactgtccccgtattcatggggcatttcgtcgtaggctgccatcagacggcagcttttctccaggccgtccataatctgaagatacagctcttcttttaccaattgttctgacatgtttcctaccccgctgtttaaataggtaaaaagacggactgcgttttgcacactcctctttcacaagctccgcaccggcaaggatatgggaatccctcagttccaccctccccgccggtccggcctctcgtatttttgttctgtaaacgaaggatctaggagccatattttcattgtggcccctccgccttcccagtccgcttccatactgagcccgtctgcaaaaagataatggccgccgtcggaaaagagaccgtgttccctgcctgcatgaatcactgcgcaccctcctgcctccagccaaagctccagtgtttcaacgctttgcgacacctccatctccaggttaaaccgctttactgcggctcttccaagccggttcatatcggtgccgtaataattggctccggcccggacagaaagatttatacacgcttccacggaaagcctctctcccgtcaggaactccaccatcatgcagacgcagcacaggccgcagccggccctggccacgctgggatacggctccctcagaacgtctcccggattcagggtcgtaggatacggtacgtccgcataggcaagctggtttatgtatgtgacggacgggcggctcataccgcctcctgagccttaaggcttccctctgcaatctccctccagtaatggcaggcaaccgagtggccgttcccggcgtccgccaaccggggacttgacgtggagcaccgttcctgcgcataaatacagcggctgcaaaaacggcatttttcgcccggattaatcggagatgtgatttcgccccgaaggagaatccgctctgtcttctgatggattttaggccttggaattgccgaaaggagcgccttggtatagggatggagctggtttctgaacagttctttggattcacacatctccaccatctgtcccagatacatgacgccgatatgatccgatatatgttttaccaccgataaatcgtgggtgataaagatataggtaagccccctttcctcctggagatcctgcatcagattcaggatttgagcctggattgatacatccagggccgatacgggttcatcgcagacaataaatttcggattcagagccaatgccctggcaataccgatgcgctggcggcggccgccgtcgagttcatgggataggtgttatagaggcggccggccagccccaccgtatccatcagctttgccacctcacggtcataatcagccgccaaggagcatattttgaatattttaagcggttctccgataatctcactgactgtcatacgcggattaatggaggaatacggatcctggaaaatcatctgcatctcctgatgcagctccttcattaaatggcggtccggatgcgagatatctttcccgtcaaaccatatgcttccctccgtcggttccagcaggtgaagaagcactctgcccagcgtcgatttaccgcagcccgattctccgacgatacccagcgtctttccctgatccagggtaaagttaatgttgtcaaccgcatggagcattcccttggggtattgaaatatttttttaaaccttttacctcgagcagcttcgccatcttatttccctcccctgtcgtcctgccgtgcactgccgtcaggctccggccgcacagtgtcctgtctgttcttgttcgtgtgaatcaggtggcatttcaccatatgtccctgcacagtttccctgatgggcgggtcttcgtttcggcacctgtccgtgcaatgcggacatctgggactgaaggaacatccggcaggaagattcgtgggatccggcatcaggcctgcgatgggactgaggcgctccgtatccttatcgagatccggaatggaaccaaacagcccgatggtatacggatgctccccctgctcgtaaatatcctccagattgccgtactcgacaatctcacctgcgtacataatcgcaaccttgtcacagacctgggcgacgacgccgagatcgtgtgtaatcaggatcatcgatgtattcagtttgtttttcagttccgtcatcatctccagaacctgagcctggatcgttacatccagcgccgtcgtcggctcatccgcaatcagcagcttgggattgcaggccagtgcaatggctattaccaccctctgcttcataccgcctgaaaactgatgcggataatcctgatagcgttcctcattgattcccaccatccggagcatctcctgggcacgcacggccgcttccgctgtctggcaatgagagtgcaggcgcaccacctccgcaatctgctctcccaccgtcatcaccgggttcaatgaggtcatgggatcctgaaagatcattgagacttccctgcccctcatttttctcagctcgtgctttgattttttcaggacattttctccctggaatataatttcaccgcctgcaatccggccgggcggattcggaacaaggttcataatcgccagggccgtcgttgtcttcccggcccccgtctctcccacaagtccgagagtctccccggccaccagatcaaacgtcaggtgattcaccgccttcaccacgttcttttccttgacatagtgaaccgacaaatcgcggaccgacaaaatattttcgctcattttcctcctcctttacgttttaagtctgggatccagggcgtccctcagaccgtccccgaacagattcagtccgaaaataatcatggcaatggcaagccccgggaaggtgacaatccaccatgcctttcttatgtaggcacggcccgccgagagcatggccccccattccgccgacggcggctggacacccagtccgataaagctgagggccgatgcctccaggattgccttggccacgctcatcgtaatctggacgataatcgggccaggcagtttggcaggatatgcttcataatgattctgaaatctgaggcgccgatggagcgcgccgcctcaatatactcctgttccttaaccgacagaattgacgcccggacgattcttgcataggcagggacagctccgatagccaccgctatgatgacgttgcgtatcccgtttcccagggcggccacgatcgatattcccagaagcgtgctgggtatcgccagcataatatcaatcaggcgcatcaggatattgtcggtccgtcctccgtaaaagcctgccagggaaccggcaatcattccgataactgccgacagagtcgcagccacggcccctatcataagggaataacggctcccatacacaatccggctgaatatgtcacggccgaattcatccgtcccgaacagatgcctgccgcctggctttaaaaacttcccggtcaaatcctgttcatccaccccaaagggagcgatgaagtcggcaaaaacggctatcagcaccaaaattactatcagagccaatccgaacatggccagcctgttcctcctaagtccattccatgtctgcctgaaaagtccttctttttttatggaggaataatccggcatgccgttcgtcgtctgttctgctgtactgcccatatcctattcctccttatcttcttctgccgtttcgcggccggccgtgccggcaacagtcgccgattcagccttatccggcacggcttttgtgccggaatttttatacccgcaggacttcccgtgactgaacgctgcgcatgggcgcgctctgcgcgtcgaggtatactgggatttgattctcggatctacaaaggcatacagaatatccaccagaagattcacgatagagaaggcaaatgcgataaagagaacgccgccctgaaccatcgggtaattctttacattgatggcgtccaccatcagctttccgatccccggaatcgagaatatggattccgccaggattgctcctcccagcataccgccgaaggaaattcccaccacggtgataatcggaatcagcgcattccgcagcgcatggcggaacacgatcacgacttccttctgtcccttggcccgggccgttgtgatataatcctgcctgattacctcaagcattgccgatctggtctggcgcataatggtcgcgctcgacgccattcccacggtcagggagggcagaatccagtgcaggggcgtatcaaaacccgagggcggcagcaccttgaaattaacggcaaaaataatgatcagcatcagtcctgtccagaagtttggcatggacacgccggtcagggcaaataccgtggcgattttgtcgaaaatggaatattgctttactgccgcaatcactcctgtgacaacaccgatgattgtggcaaaggagacacttaataccgccagcgttacagtggccggaaccctctggaggatctcgatggataccgactgctttgtcgtgtaggattttccaaaatcaaatttcgtcacgatattttttatgtaattgaaatactgtacaagaaacggctgatccaatcccagttcatgatggagcgcattaatattttcctgggtggcgtccatccccagcatgtattccgccggatctccgggcgtaaaatacaggaggctgaaaataatcagagagacgcccagcattacgggaatcagcgccaatattcgttttaatataaatttgctcatagaatcagtactccttcgttcgctgttcgtagcagttcagacggcatgaactgttacggacgtccgataatctcatctacaatcttctccatataatcgagggagtcctccgtcattttctttcctatctcataggtggcttttctggcatctcccagcgccccgttgagcgacgcgtcgtttttccagctccaggcagcgcctccctttacgaaggaatcgtgtgtgagcatgctgtcctgtataatgccgggaacgcgctcactgcgcaccgtctccgggcacagatagagacaggagctggtctccacctcacaggcgtgtccgttaagctttggaagtcccgtcagtccgcccagcgatatctcagagccgactgccgaccagtaagcgtcaatttcatgattttgtttcagactgataactgcgccttcaagagccggaaaattgcctccgtgtgcattcagaaacagaatcttgcgtatgccgtgctgcgcaatggatacgccgatatccaccagcagatgcatcatcgtctccacctggagggtcaccgtgcccggaaaatccatgtggtgcagagacagcccgtaatttacacagggaaagaccactactttatttttgcatcgcacggccagcttttctgcgtaggccgccgctctggcggcatccgtcgcgaacgtggtgttgggtccatgctgctcgcaggagcccaccggtaccagggcaaccttgatatgttccatttctgcctctaattcgggccacgtcatgttatttatgattaatttatccattctgcttacctcccgtacctgcaggagcctttcagacggctcctgccattttaattattcgttacagttattcagtaacagtcacgccggcgaatgaaggaatatctccgggatcgcagtagaaattctgaaccttgtccgtgattacatagtttaccgtcttattggccacgcctatcatatagtactggtgatagatgtaatcctgcagctcttcatagacagccgcccgctcagccgtatcgtaagctgcgctgcccttatccagaagttcatcaatctttttatctaccggacggaagaagccgtcgcttctcgtatcaaaatctgcaagagcatgacccggatcacccgtggaataggtggccgccatgattgtgacctgattgtcgccgcggcgccctgccgcaataatctcggaagtggatgctgtggaaatattggccgtaaccccgatctctttccacatattctgggcaatcacaccgatattctgctgctcggagccgtttggaaggttcagctcgatcgtaagcccgtttccgtatcccgcctctgccagaagttcttttgccttctccacattatattcgtgtctgccctgagacttataggaaaagactgtggacggcatcacgctctcgctgaccgttgcataatttccataaaccgtctccacaagggaatcgagatccagagccagggaaagtgcctgcctgattctcacgtcgcttagcaccttgtcatccatggaaaatacaatgtaagacataccgtagctgtctcccgaaacgaccttcagcccgtctgtctcagccagcctgtccaaatctcccgtatccggatccagtacgatatcggcattgcccgattctatctccagcgccctgttggctgtctccgtgataaatttgagggtcagagtggaatatgccggtttttctccccagtaattgtcattgcgcttcagcgtgatgctggtgccgctcacccagttgtcaaatgcaaatggcccggttcccacaggactgcgtccgaactggtcatcccccatttcctccactgcctttttgctcacaataccgcctctcgtggaagtcagataattgtacaccgctgcaaacggggcttttgtcgccacatccacggtcagttcatcgacggcctttgtgttttcagcgtcaaaggatgcaaatatcgaagcgctggacggctttttggtcgccctttgtatcgtatataccacatcgtcagccgtcatcttctccccattgtggaaatatacattatcgcgcagtttgaagcggatcgtcttgtcatctacctgttcccagctctcggcaagacccggaacaatatttccttcctcatcctttttgaccagtgtttcaaagatctgcacctgggttgtcatcgccaccagctccgtattaccatgaggatcgatattagacggctcacccttcaataccacagtcacctcatcctttaccgccgcattttcagcggccgtctcccccgactgagcctgaccgcctcctccgcctcccgaatccgacggcacatcacttttacccgcacagccagaaagcaaacacagccccaaaaccattgccagaaataactttgtttttttcatgatacctctccttttctgtatattaaaattaataaataaccattcagacgctctcagaaaaatgtcagaaaaactccacccaaaacagccccatatactgagcggactccgatacctctccccatccccacacttaaagcgcgagacaatcagccgccgcaggccagtggacgggccgacgaacttggccggagtctttcttcccgacgaaaaccttccttgggggcggaggggaagataaagtctgcggatgcctttggaatccatcggtgcttgacgaggtattttcgagtctagcatccgttatgcattccagggagcgagagtgtgctccgcagaccttatcttcgcccgcagccacaatccacaacacatcattaaaaccctacaaccaatgtgcctgttcccacagcgtcagcatcgtccccagctcctgtctggccgcctcctcaaaaagggtgtaaccccaggaaacgtcttccacaggcagtccgcccgaaataaacaggattttttcctcctcggactttcggggattcacctttcccgcagccacatcactcaggctcagcatatcctccgctttcacctttccctgatccagcagtttcagcatctggtagcttggcgcccagtcttttgtgctttctattccgtccggatgcatcttcccctcgtcgtaccagacctcatgcatgggccagtaatcgaaaaccacctggttttccatccagcattcttccgaaagctcggcatgtcccgtcgcagtaaacaggcagcccggtttcagccagtccttatcaatcacaacaggaaccggccctgccgccgcgacactgataacatccgaatcagtcaccgcttccttcaaatcctctttgataataatttctatatcgtattcttttctgaattcctccgcaaacgactccgcgctggctctcacgatatcattcagatacatcctctttaccccgggcatactgttcaggattccccttgcgcaggccctgctgataacgccgcagccgataacgcccagcgactttgcatccctgcgggccagatatttggccgccactcccggaacgcagcctgtccgcattgcgcttaacaggtttgccgacatgatggctaacggctccccggtcaccacatcattcagacccaccatcagaatcgaacggggaagccccctctccttcgggtttgtgatattcgacccgtaccatttcacgccgcagcagttgtatctgcccccgatataagccggcattgccatataccttctgtctggccctgcaaccggcatattgggaaacggcgtgtccttcggataccacagcatacagccgtggctgctctggttatagccgcccatcacaaaatccccggctcccagaagcttaaaagtgtcgtccataacctccacgcatttttttacatccagcacccctgctttgatcatgtcaggttcggataaaaacctgaaacctacctgtttccgttccataagacctcctccattctttaaattcctgcattctctcctgttttgccgtcattttcatttattagccagtgaatttctaatatgctccatcccctcttccagatatcggcgggggcatgcgatattcaggcggacaaactgctcataaccacttccatactctgcgccgaaatttaaagccaccttggcctcatccctcattttcaggaacagctcttcctgcgtaaaccggcagcccgaaaaatccatccacatcagatatgtgctttccggcatggccactttgactttcggcagatattttgtaatataaccgaccacaaagcgtgcgttctcttccagataggccatcatctcatcaacccacgggcctcctttttcataggccgtttccgtggcgcggtaagcgaaaagattgatatataagtgcatactggctgcaaaattacctaccttttcacgcagctccctgtttttgataataataattgaagatttcagcccggcaatattgaacgttttactgggagccgtgatcatcaccgcatcctcatctacatttaaaatcgagaggtggcgataacccgggtatacaatatcgtaatggatctcatcggagataatcagcaccccgtactgtttgcaaagggacgaaagccgcttcagttcctcttccttccagactctgcccacaggattatgggggctgcataatatgtaaatactgactccctctttaaatttcttttcgatatcttcaaaatccagctcataggattcgccgttatacaaaagcggcgactcgaacagctcatagccaagacctttcactacggtaaaaaacggcgaatagacaggaggatttaccaggattttatctcccttctctgcaaccgacagcaggaccaccgataaagccgtaatcactcccggcgccggaatcagaaattccttttcaagctccagcccatggcgttcccggttccaggcaataatactgttgtaatacctctcccctgcaaatgtatatccgaacgtcatcccctcgccggaacgttcctgaagcgcctggttaatctccggcagcaccggaaaatcggcatccgccacccagaacggcatcagatcatcccggccgtagtcgcgctccattgcatcccactttgtactgtccgtatgtctgcgttctaaaagcacatcaaaattatacattctcttccctccgtctttgattatttatctgcttttatatttatactcttttatatttagcttctttatagttaatgtgctaaactttaatcttatctattttatatcaccgtgtatcggatttgtcaagatattttctgtgtattttgatgattatcaataatatttatttaatagttcaacaaagcacacgacatctgactattagccgcatcttcagcctgtacaactaccgtgatagatccggaattctcttccaacaacgatatctgcagatatctgtatgctccgcgcacaggtcaccgccatcaaaaaaagacaagaggaaagcagaagctttttcctcttgtcggtaatttatactattaaattaattatttatgcaaagaatttagaccagtagccctgtacgaagatataaagaacaacgaccggaatgatataggatacataaaccctggcccataccgggaatttgatgccctttccttcattggcctctccaaggaaattcttaaagccccagccgtaacggcttgtacaaaacagcaggtaaacgaggcttcccagaggaagcagattgttgctgactataaagtcttccaggtcaaggatcgtagatcccggtccgaaaggtgccacattactccagacattgaatcccagaacacagggaagggataaaagggttacggctatcatatttacaacaaccgcctttttcacgctgcagcccgtgagatccgttgcaaaggaaacgatattctggaatacggcaatcaccgtagacgccgccgcaaacgacataaacaggaagaacagggttccccagaatcttccgccgggcatattattaaacacattgggaagcgtgataaatatcaggctcggtccctgtcccggttcaatattataagcgaagcaggccggaaaaatgatcaggccggccataaaagccacaaaggtgtcaagaattgtaacattgattgcttcgcccgtcagtcttctctctttgccgatataactgccgaagattgcaagggctccgatcccgatgctcagcgtaaagaaggactgccccagggcggcaaacaccacctctccgattccagtctcttttatcttgttaaaatcaggttttaaatagaattcaaggcccggacggcttccctccatccgtacggagttaattgccagcacaaccattaacaccagaaggctgaccatcatcagctttgttattttctcaacgccgccctgaagtcccatcgcacagacggaaaagcagaatacgacacagagaaccatgaaaccgatcatcaatgaaggattggacagcatcgcattaaactctcccgccactccgtccgcatccaggccggcaaaatcacctgccgccattttgacaaagtacaggaacagccatcccgctaccgttgtataaaacatcatcagaatgtagttgcctgccattgcaaaccacttctcaaaatgccatttgcttcccttcggctccaatacgtcgaatgaaagcgccgcgctcttctggctggctcttcccaccgcaaattccataacgataatcggaagtcccaaaagcacaaggaagactgcataaatcagaacaaaggctgctccgccgtactgtccaactatgtacgggaaccgccagacatttccaagaccgatggcacagcctgcggaaatcagaataaaaccaagacgtgatgaaaatttctctctgcccattaccattctcctttataaatatacatatccctagcgtgtctgaaaatcgctttccgtcaaatatgccgcgaagcggggcgtgcagatgacgaattttaagacatactctagctagtttactatatatttcaataaaagacaaggttttacttccgcagaaataatacccaacccaatcccgtccgctgtaccggcggcgtcctcacatgcttaactggcccccggtgttttacaggatatccttccggtactcctcgagttccctgatatacatctcaccaatataactgatcggtatttttttctttttaatatatcctatatgcatcacatcctctgtccttaatggtacggccgtatattcattaccgttcagttcccggcagataataccggagcagagtgtatagccgttcagccccaccatcagattcaggagcgtggcccgatcatccgccttgatgatccgcttatattcccgggtgctgaatacttcctcggcaaaatagaatgaattctgttccccctgttcaaaggagaggcagggatattcctccagttcctcgaaatatatttccgtcctgccggcaaggggatggtttttccacagatagacaaaaatgccgcaggtaaacatctcatggaactccagttcattgtctttcagcactttttccagggcttttctgttaaaatcgtttaggtaaataatccccagctcacttttctggcgtttcacattgtccactacttcaaacgttttcgtctcgtggacggcaaattcgtactcgtccatgccgaatttcccggcaagccggataaacgcctccacggcaaaggtatagtgctgcatggagacgctgaatttctttttaaaagctttccgctctatataccgcgcttccataagacggtactgttccagaatttgtcttgcatagctcaggaactcttccccctcagccgtaagttcaatccccctgttggaacggcggaacagggtaaggcctatctccccctccagctccctgacggaattggagaggctgggctgtgagagatacagggcatcggcagcgcggcgcatggatttctgctccgcaactgccactatatatttaagctgctgtaatgtcataccgggtacgatcctttctgcggattttttctctcccaattatataatgcccgacgcctgttttacaagcgctctttcagacacgctatgattcaaggtagcttttccccggattcagtatgcccttcccgtcaaaggattgtttaatcattctcatcaattccagcacctccggcgacgaggcatgttcaaaataccgcttttttgccagcccgatcccatgctcccccgatataagtcctcccagttcttctgctttgctgtagatgcgcgccaggacggcagaaagctctgtttcccatctttcctgtgggatatcccccctgactacacagagatggacattcccgtccccggcatgaccgaagcttaccatcccgattcccgtctccttctgcagtccggagcagaaggttacaaattcttcaatccggtcgatcggcacgactacatccaccggctcctggatgctgactgcctccacggcctttaccagagccccgcggattttccagacacgctttgcaagctccgcttcatccagaaccagaaaaccggacgcgccagacaggcgcagtactgtttcagcctttttaaggtcctcttccacccccgtccggctcccgtcaaaggtcagaatcaggtaacaggctgcgtcacagggcggaaacttctccccggtaaactcctctccgagccttaccacatccttttccacaaactcaaccgccgtaggcgccgtcccggaggctgacagggtatgcacacttgcgatcccctctctcagcgtccgaaagggaaccagggctgaaacggaatactccggctttggaagcagccgcagtatacattttgtaataaccgccagcgtcccctcggaaccgattaacagatttgtgaggctcagtcccgagctgtcctttctgtttctgctgcccaccgtgatcacagtgccgtccgccttcacaagttccagccccatcacgtaatctctggtcactccgtattttaccgcccgcattcctccggcattagtactgatatttcctcctattgtggactgcttctctcccggatccgggggataaaaatatcctttttcctccacataactctgaaaatcggccagcaaaacccctggctccacggtcgcggtaaatgtatccggatcaaactccagaatgcggttcattctggacaggtcaaggacaatgccgccgtccggcaccgtggctccggtcaggtttgttcctgctccccgcggtgtgaccggcagttcattctcccatgcagaacgcataataaaactaacctccgcggccgactccggaaatacgacgagagctgctgcgcccttccttctgcccatggcatcgctcaaatatttcccatctattttatctgataaaatctgatcgcttctcagcttctttttcaaatacgccctgattgtatccgtccggacctccgtacgtatgtccggggcggcctccctgtctctgcctgttccaatgctgagtttatcattcattctcatatctatctccctctctctgtccgtcgctgcggccaaaggccggttcagtccttaacgccggtcaagcgctgcagccagccggtcgccgaaagcctgcccgagttggacggctgcaatcagtaccagaaccgtaagcaccattacccctgtttcaaaacggtagtaaccatactggattgccagattgccgatgcctccgcctccgaccaggcctgccattgcagagtaactaatcaggctgacaaatgtcacggtaacagccctgaccaggccaggcgccgcttccgtcagtagcacgcggcggacaatcagccaaaatccggcgccggagcctgccgcggcttccaggaccccctgatccacctccctcaatgcaccttccaccagccttgcctgaaaagcaactgcagctatcgaaagaggtacggacgctgccagcggtccgatttttgttccgaccagcgccttcgcaaggggcagacagaataccatcagtatcacaaaggggatcgaccggattacattgacgacggctcccgatacggcattaacaaacctgtttctgaaaaaaagcggactggaagtcagaaacaggacaaacccaagcaggagtccgaacacggccgagacggccatggaaatcgccatcatctgcagagtttcaatcagcgctttgggaaactccctgcccaatatctcaaatcccgactgtatcataaccatacctcctgacctccaaaacggcggcgcgcttttccaccttggcataccgcctcatataggcggccgctttttccttctcctccctctctccctccatcgatataactatcactccgtaagggcggcggcagatatattcgatttttccgcccagaatactgacggatacctgaaactgtttcgccatattgttaagaagcggttcataagcctctttccctgaataggaaatggtaaaaatttcccgctccccggtcagcagctcttccggaaccgacagttcgaaggatttactgaccaactgctttgtaacctcttctttcggagcggtaaaaagctcataggtgtcaccggcctctatgatcctgccgttctccatcacagccatgcggtcaaagagctgcctggccacctccatctggtgcgtgataaatagaatcgtaagaggatacgtttccttaatccgcttcaggacctcaatcacctcagccgtattttccgggtccagggcgctggttgcctcatcacagagcaaaatctccggccggttggccagcgctctggcaatggccactctctgcttctgcccacccgaaagctccgccgggtaggcatggagcttttcggacaatcccaccagggacagcagttcctttgtcctttcctctgtcttcctgccggataccccggcagccagaagcgcaaattctatattccggcccacatcggcattcatgataagattaaaatgctgaaatatcatccctattttcagccgttcctctctgagggcccggccctttaatcctgtaatctccctgccgtcaatccttatgcttcccgaatccgtcctctgaagccggttgacggtgcgcacaagcgtgctttttccagcgccggaaggtccgactatcccgaagaattctcctgtttccacagtcagggtgacatccgacaccgcatgaaatttctttcccctgttttgaaatgtaacggatacatggtcaaattctatcatttttcctcccaccactgcggcctgtcgaaaccgtcataaaagctgtcctccgtgattgcccggctgaatgcgtctgactccaccgcttcctttaacaggctgccgatactgccttcaccctctttttcatccgccctgacggcaatcacgtttttcatttcttcctgcaaacgctccacagccagcgctttccggtaatccattccggctgcaatcgcataattgccgggaatcaggccgattgccacgctgtccaggcttctggaaatctgagccgcatccattgtcacaaattccagttttttcgggttttcaaggatatcggctgtccccgctttcgtctcgtcaatgtcattgctgatggatataacgccgcagtctcttaaaaaccgcagcgccctggccagattcaccgcatcggccggaagcgctacccggtctccttcattcaattcagaaagctcggagcgggtatcggaaaagatccccattcccagtgtcggcacattgattaccgaaactatatccacctggttatcttttgcaaactgatccagatacgcctggtgctgcatcaggtttgcatcgatttccccctccgccagagccatatcgggctggacatagtcggtaaattccactatttccgtcttatatcccttctcctccagatagggagcgactgcttttgtgaacatatctccgtacgggccggcgcaaacgcctattttcaaagtcgtctgcccatccctctcctctgccttttgaactcctgtttctcctgcgcatccggctgccagaagcgccattgccaatataacccctgctgccgccagccggttcttttttaatacgcccttcttaaatgtgtttctcttaaccgtgttattcttccatgtgatctttttcatcctgtcctccttaccgctcctgcaatagaagcctgctggttgctgttcacagaacagcgttttacagcgggtccgcgaatagtaacgcctgctgttattgttggagcctattatacaaaaagaggcggcttctgcataatacgaattaaaaaacgggcgtgatagtcaaaaactatcacacccgccgttaccgtattgtaactgctgatacttgcagtatttatatttccatacctttacatcggtccgaaatgaatcgcctgggcaataatcagcattaccgtaccggttcccatccagataaagaacagcttccacatgaatttcatccatctgtcgtaaggaatattcgcagcactgataattcccatcagggctgtggaggtcggaagcacatagttgcagaatccgtctccgaagttgaaagcaagcactgcagtctgtcttgtaattcccagcagatccgcaagcggtgtcataatcggcataacggctgccgcctgtccgctacctgatgtaaggaatacgttgataaccgtattggcaatcagcattgccggggcctggagaaccgccggaaccatgttcagtccgccggccagcgcatgaacaaccgtatcaataatattgcctgatttcatgatgctggaaattgcgcttgccataccgatgataaaggctgcgcccagcatctttttacatccggtcaggaaatccttggagattttggacgggccgaagcctgcaatcgcaccttccaccacggccaggcctaagaagatagcggccgtctcttccatgtcccagtccatcttgataccgccgtacacaatggcgacaagggctgcaaagaaggcgaacataatcaatacttttctgaaatccatggtaccgaaggtttcaaggtcggcattttctttaaattcactggtctgatccagatcatacatcgggctgtattccggatttttatgtaccttcatcgcataacggatcaggtagatattggtcactacatagaataccgcaaaacagacgaaacggtatgcgacaccggaataaagcggaagctccgcaatcttctgggctacaatcgtcgtgttgatatttaacgggcctgtggaaaaacctacggctccgcccagaaggatgatggccgcaccggtaatggaatcaagccccatggccattgccagcattaccataatcggcgcaaaggctatgaacaggttcaccccctgtgtcgtacagataagggcaaatacaagagtcaggatcggtatgaaaatatataacttcccggaaaatctcttcgcaagctttgcaactattgcgtgaagagcgcctgtctctgttaccatatggaacgctccgccggcaaaaaggataaccagcatcagatcaatctttccgataaacgctttgacgataaaaagcggaatcaggaacggattcaccggtgtcctgtctacatagctaaactgcgtcggatcaattaccttaatcccttccgcattttcaaatctcacatactctcctgccgggataatccatgtcaggactactgccgcaagaataatgataccgataatgacaaaggtatgcggcattttaaatggtttttttgttttttcactcacgtttgtatccccctatttcatcctcatctcatcagccatcctgtcggcaaattcctgtttcactgctttcagcagttccggccgcatcacaagatccagggccgctccggccagaatcttcgcaccgtaagaaatcgcgtcatgtgcttctttgctcttcccggcatccacgtaatcctgtgaatgggaggctgcatcttcttttacaaaggcaaccctgatacaggaacccggtacgcggtgcatgatattgccaaaatcagtggagcctgtcttctctctggcgggacggattctgggcgcctccacctgagaggcattatccatcagaatatcattcagcgccaggcacggaattttgctgtcaattcccttttcctcaattatctccacttccgtctccgtcatcatcgcagcgccttttaacaccttctggaaccgttcaatcaccgtatcgagataattgcggctgtaggaacggacatagaagctggcctccgcgacagccggaacaatatttgccggtgtgccgccacagttcacaatggtatagtgcatctttacatcgtccgcaacatgttcccgtaaaaattccactccctgacaggccataatcagtccgtccagggcgcttcttcccttctctggttttaccgccgcatgggcgcttacgccgtggaagacaaccttgaacctggaaagggccaggctcttcacatccacctgggttgcaccgctgccgtgcatcatcagagccacatccagctcttcaaatgtacatccgtttttcagcatcatgattttgccgctgacactctcttccgccggagtgccgtataccgtcactgtataattcccgtctgcctccgaatttttgagcgccgctgccgctgccagaatggacggcccctgaagctggtgcccgcaggcatggccgatttcaggaagcgcgtcatattcgcagagcaggccgatgtttgggccgccgttcccatgatgatagattgcccggaatgccgtttccacccccgctacaccgcgctccactgcaaaaccttcctgttccagccagtctgtcagcagtgcgaacgcatggtactcattcagccccagctcaggatggtcgaaaatatcatcagacatagctgccatctgtggggcaaccgcatctatgtaccggaacattttctctttttccttcagcataaaaatacctccttcaatctgatacattcagtatatcggactttggaggtatttgtataatttatagtttttattatttgtattaggaaaatatatattccttcccctgctcactgataagctctataaaacgctgcatgtactccggcacaaacatcccctgccggtaaccggccacaaacgccgttttccttggagattcacccattgtatagtaattcacctttttccggtacttcatatttcccgcatagctttccctgttaaagctgattcccagcccttccgccgtcatctgaatggccgtctcaatattccggatcacctggattttcccgggatgtacgcctgcatccttcagggccgcatcgacatcggcgcggatgctctggttgggattctgaagaatcaggttttctccctccagccagttgagatccaggtttctgtagcgggaaccctccacatatacggccttctcattgagcggatggatctggggaacggcaattaatagctcctcctcaaacaaaacctggtactccatatcttttctgacagaagccgaattcatcagcaccaggtccagttcataccgctccagcatctggctgatctcccacatattgccctcccggattaccacctcaatgccgggatattcggaggcaaatttaaagagaaccgggggaaggagccatgtttcacggcgcagctgcactccgacccgtattttccccctcttgttatcccgtatctcagccatggcctcgtcgaattcctttttaagctccagcatctttctggctttttccacgtaaagctccccggccggcgtcaggacaaaccgtttgcccgccctctcaaaaagcttcgtgccaagcgacttttccagattattgatatagatactgagggccggctgtgaaatatacagcctgtccgctgccttcgtgatattgccgcattcggccagtacgcatacataagtttgttctttcagattcatgccgcatcttcctttcccgttccgcttaaatcccattatagcacagaagatgtttttataaaacttatatattttttattattattttattttttatatagatatgccattctcaattactgctcccgccaggtttatatcggtgaccagcacattgattaacccggcacgtaccgcccccaggacggccggcgctttatgcctgcccagagccgcgccgatcgagaattccgttctgcggacggccgcaagagaggcgcctgttactttccggttcagaggaaagcaatccgtattgccgtcagcgtcaaataaatatccgcagcagctgcccgctgcctcccgttccctatcctcaggctcctggtattccttccatatcttactgttcttcagcaggctggaggtcgcactgactccgctcagcagaaccttcatctgttccgtccgcttcactgcctcccttatgaccggctgtctcataaatacttcgcggtcttcctcgccggcagcgtagaccggcatatgaaaaaggctgacatccgcttgatacaggccggccaccttccaggcgagtctctgggtatcaagctccggattcatcaaaccggcgcttcccgtcagcgagacgatatgaaccggcagcattctgtctgcttccattctgccggctatcgtggctatcgttttcccccaggctattcccagcgtcatgcccggctccagtaatgattttaccagcccggctcccgcttttcccagtccggccagagtctcttcatgggtaagacggctgttatctatcaccactgcgtgcttcattcccagacgttccctcagctccttctccagtccgccgtcccgcttcacaggcgtatggattttgatttccacaattccccggcgggctgcctcctgaatatactgcgccaccttaaaccggctgattccgaatcgttctcctatctccgtctgatttcttccttccatataataaagcctagccatctcagccatctgctcgctctgaaattccgtattcattctattcgctcctatccggtctttgcagccgttttccggcagaaacggctgtaccctaatccattttaacaaatgtgaaatattttcacatttgttgactttgtcttaccgccatgttaccatattcttaaaagaatggcaagtacacaaaaaacgcatccgaaaaggaaggtaaaatttatggttaaagagcttctaacccccggaaagataggggaaaccacattaaaaaaccgggttatatttccctcgatgtgcaattactactgcgatgacaaggggttcgtaacagaacagttaaaagagtatgtcagagccagggccaggggaggcgcggctatgattattatgccggggagcccccatggaacgccgggcccggcccggcccgcgctgtcctcccccctatacctggacggctggaaaagcctggcaggtatctgccattcgtacggatgcaggctttttgtacagatacatcctgctaatgcccaggcagaacgggatcccgcactgctgctgccggataacatggaaaaggactatattctcaaattgacggagagctacacgcgctgcgcccttgccgcaaaagaggcagggcttgacggagtggaactgcacggcgctcatgcccatgaaatcgctcaattcctttctccctattataatcaccggacggatgaatacggggtagattatctgggacgcagcaagctctaccgtgatattgtctcgtccataaaacaagcctgcggcagggaatttccggtaatctgccgcatcagctccagtgaacggattccaggcgggcaggggcgcggcattgaggaaacagtaaagatcgctccccttctggaagccgccggagccgatgccatccatgtttccatcggaatgccgctctcagagcaatatatctccgccccgatggatgtaccggatgcctttaaccgcggggaaattgcatgtgtcaagcgcgccgtccggatcccggtcatcgcagttggccgtatcaattcaccggagctggccgaagaactcctgagggatgggacggccgattttaccgcagtcggacggggactgctggctgatcccgattttgttaataagataactgccaaagaacccatctgccggtgtctcggctgcaaccagggctgccgcaaatccatcaccaagaaggccatcttctgtgtacagaacccatttacgggcagggaagcgtctctccatcccacatacgaggaagggcttgaaaacaggcggattctgataatcggagccggccctgccgggcttgaagccgccagaattttcgccatgcgcggcgcccgtccggttatctgggaaaaggaacacattccgggcggcctgatcaacctcgccaagcagcctcctcataaagatgcgatggaacgaatcatttccttccgcctggaaatgctgcaaaaggcaggtattcctattcttctgaatcaggaggcagccccggaaaatatatcggagtttcatccagatctcattattctggcctgcggcagttctccttccgttccgcagattcccggactctgccttccggacggacagccaaaagagaacatttatcctgcggaccgtctcttccgggacccggcgctccgggtgaaactccaaacagacggacttcccgttgccgttctcggcggaggcctgatcggtacggaagcagccgagactctctctttgcttggccttcctgtcaccgtttttgagcttggctctgaaattgcaaaggatttgaataaaaaccggcactattttgtcatggaacgtctaaggatgggacgggtcagcctgttaaccggtgtacgggttacaaatgtctgcctgccccgcgtcacctgccggaaagacgggaaggagctggacttcgacggttttggtacgatactttatgcactgggaagacaaaatttaagctcccgccgtttagaggaaaacttaaaaaaagccgtcccggatgtcccaatactctccataggagatgcgagacagccgggaatggctatggacgcgattgcagacgccgccttgacggccgcaaactttcatttttaaatttaatttgacagaaagtgcaggaaacggcattttttgccgtttctgtgcatcgcggagcgtgttactgttcgcggagctgcgctttttcagcagggccgtgaatagtaactctttctgtcagcttatcgcttcggaaccaatattataactccactctccatctgaatacactgccgttatatcagacaggtaataggctcccgtaccgcttctgtactttttggcattacacttaaccgtatcgccctcagaagaaatctcctcgatcgtaaccaggagcccgttttcaattcctttctcccgatccagaatcccggcttctgccagttcctctgccgtcgcctgtgagccgaaaacaccgaaactgcttccgcccatataggcaagcccctctttctctgccgccgtcagggaagaaacaccggtaaaatcaaagtagcattccccgatcccgtcatttaaaccggaatccttctcggccagctctttgataatctgctggtaaaggagcagttccctgctgccggtccggcccgtcagcctcaatctgtcataagaaaactgccccggatagctctcctgtaccatcccgttccatgtaagctccacgatcatgcccggttccaaatccgacacctgaatcgcattcccttcttcatcctccagcaccgggccatggcctgcggtataaagtccgtatgccgtatcgacggcgcttaccagaaggtatttctccttcacctcaagaatttcaaactgcctgccgttctgggaatatgacggtccgtccgcatccccgttctccggctcagtctctccatccccgcttaccgtctgcgtttcattctgtactccggccgccgtaccggccgtttcattcaccgtacctccggccgccccgctgctgccgcagccgtacagaaataccatacagcctaacaggatgcagcccaggctttttctcactgacgaacttatcataattatcctcctcacatcgttatctaagtacccacattataccagaggcagcgcggggatgtattacctttcatttaatgttttattacaactattaccgcatatggagtcactgcttaccgacgttccgggaacagttatccggtggatcaataactgcccgtacatgccgggtatatcccagcctgcacgggcagtatatttcctgtaaatgcaaagacctgtctgaacggttacttatctgctctcttccacaaatcttctgatattggaagcattgacatatttcttcacttctccgtctcgtcccacctggaccagagtcggcgcctgcattatgccaaagcggtcggaaagctccggattctcctccgcatccactacctcatactccctgtcctttaaaaattccttagccatgcggcaattgggacaggtttttgtggtaaagaggtaaattccctctttggcgccgctctcagcccggtctgcgcttttctccggctccaggacaaacgttgttccgtttttgagaacggagcgtgtgatatcgtaagactttctgtctttatattcctgtgtcttgccttcgttccagttctgtaccggacggtagtaaccggtaatacggctgtatacctccgcctttctgccgcagacaggacaggtaaaatgctcccctatcagatagccgtgatcctggcagatagagtaggtcggcgacaatgtatagtacggaagtttgtaattctcggcaatcgtcctcaccagcttggatgccgatttccagtcgggcagcttttctccgaggaatgcatggaataccgttccggaggtatagagagtctggatttcatcctgcacgtcgagcgcatcgaaaatatctgtcgtatatcccaccggaagatgggagctgttggtataatacggcgtttctcccggttcacctgccgtaataatgtccgggtaacgctttctgtcatgcttcgccagacggtaggaggttgactcagccggtgttgcctccagattgtaaagatctccgtaaagctcctggtaatcggccaggcgctccctcatatggttcagcacatccttcgtaaaagtctgtgtctcctcatgggtcatgtccttccgcagccatctcgcattgagtccggcttcgttcatgcccaataagccgatagtggaaaaatggttggcaaaggtgcccaggtactgtttggtatatggataaagcccgttgtcaagcagcttggtgataacttcccttttaattctcagggagcgggccgcaatgtccatcatatggtcgaggcgtctgtagaagtcctcctcatttaccgccagataggcaattctcggcatattgattgtgacgacgccgacggaaccggtactctctcctgagccgaagaaaccgcctgtctttttgcggagctcgcgcagatccagcctcagacggcagcacatgctcctgacatcactgggctgcatatcgctgttgatataattggaaaaataaggcgttccgtattttgacgtcatctcaaacaggagacggttattctccgtatcggaccagtcaaaatccttggtgatggaataagtcggtatcggatactggaacccgcgcccgttggcatccccctcgaccatcgtctcaataaatgccttattgatcatatccatctccggcttgcagtccttatatttgaaatccacctctttgccgccgacaatggcgttcatctccgccatatcctccggtacggtccagtccagagtgatattggagaacggcgcctgggttccccagcggctcggggtgttaacgccgtagataaatgactcaatacatttctttacggcatcatatgataaattatctacttttacgaaaggtgcaaggtatgtatcaaaagaggaaaatgcctgcgctccggcccactcgttctgcatgattcccaggaagtttaccatctggttgcaaagtacggaaaggtgtttggccggtgaggaagtaatcttacccggaatgccgcccaggccctccgtcagaagctgctttaatgaccagcctgcacagtaacccgtcagcatggacagatcgtgcagatggatatccgcttccctgtgtgcctccgctatctcatgatcgtatatttcagagagccagtagttggcggttaccgctcctgaattgcttaaaataagacctcccacagaataggtaacggtggagttctcctttacccgccagtcctccacctggacatagctgttcacaacatccttataatccaggatcgtcgctttcatgttacggattttttctctctgctttctatatagaatataagccttggcaacttccgtatagcctgtctgttccagcacatgctccacactgtcctggatctgctccacgctgactttcccatccgtcattttggattgaaaatcggctgttacgcggagagacagcagttccaggatctcctggttgtagtcattcttcgtcgccttaaaggccttcttaattgcattggtaatctttcccagattaaagtccgccacttctccgtcacgctttatcacgctgatcatgttccttactcctttcattcccatcctcactagggttcgtatccaattatagcagatggcataataaaacacaatatctggtttcataatatttagaataccagatattgtagtataatggttcggatgggggagatttaattaagcaggtgaggacgccgccggaacggccagcggacggggtggtggggtggttttatgagtctttcgtcccgggggagattgtcgtggtttggggctgcgggcgaagataaagtctgcggagcacactcccgctctgtgaaatgcatcgcgctgctaagctcgacaggacctcgctaatcagcgatggatttcaatggcatccgcagactttatcttcccctccgccccaaggtcaggttttcgccgggacgaaagactccgccaagtatatcggccccgtccgctggcctgcggccgctgattgtctcacgcgttaagtgcggggcggaccttgtcgcagccactaagcgcttccgtgtgcgggaaatacgatatgccttcaatgcgcctttataaaagaattgcgctagatttgatatcaacctgccggaaacacgtagtggccgcgacagggtcctccccatttaaggttagagacaatcagcgcccggaacggaccatgtccggtgccgcaaaaatctccgcctgagtcttccgtccccggcggaaacctgagcggggaaggaggcggaatcaattctggaggggacatggaagcccatccgtgcttaatgaggttttttcgaatttagcacggctatgcgcttcgaagagtgcaaacggtccccgtaagaattcattccgaccggattccccctcacgacaccctccaaccagggacggaagattcagtcatccccctcgccacaccggacatggtccgttccggacgcgtcctccaacctcagttaaatctccatatactcaggcctcagccataagtccggcgtaaagctctgtaggcacatatgccgtgaccaggatcccgtcatcccggtactcctccgagagcagctggccgaatttccggattgtctgaattttcccggcatccttataggtgtacaatttttccagaaaaatcttgcgcccccggagaatcgtctccagaatttccgtaagttcttccaggccctcgcccgttctggcggaaatcttcacctgataatccgactgcagatcttttaaaattacctcctgctccaggcagtcgattttattgaaaacagtcacaattgttttatctttaatctccagcttacgcagcgtctcatatacaatatggatctgggaatccatctgagggcttacacagtccaccacatgaaggatgatatcgctgtacctggcctcctcaagcgtacttctgaacgcttctatcaggtggtggggaagctttctgatgaaaccgaccgtgtcggtcagaagaatcttctgtccgctgggaagttccattccccttgtggttggatccagtgtggcaaagagcttatcttccgccaggattccggcccccgtcagtttattaaggagcgtcgatttgcccgcattcgtatacccgacaatagcggcggataacgtataattccgatccctctgctttctcgctacctcacggtggcgcttcacttccaaaagctctgctttcagctggccaatcctgtcgtgaatcagccggcggtccacctccagttttttctcaccaggcccccttgttccgattccgccgcccagacgggacagggaacttctaagacccaccagtcgggcagccctgtatttaagctgcgccagctctacctgtatcttaccttcgctcgtcacggcgtgggacgcaaaaatatccagaattaccatggtcctgtccataaccttggtatccagggcattttccaggttgcgcagctgtgccggggaaagttcatcgtcacaaatcaccccggtggcgcccagctcaaagacgcgctccctgacctcttctatttttcctttgcccagataggttcccggatgaatcctctccctgttctggactatcttgtccaccgtcaccgctcctgccgtatcggccagttcctcaagctcatccagggactgtcttgtatcatcctcgtcggaggtgctgaccgcaatcagaatcacgcgctcctccagctcttttaaatcaatcagttccgccatgctacctcctgtaaccctgagccgtgcaaaatatcacgttttccctaacggctctccaaaaatgcaatctctttttccagctccggcgtggaaccgtactttgatacatagtttctgaacgtttccagagcttttccaaaatctcctcttttctcatagaccgcgcccatgttgtacatcatctgctgaacctgttcgccatcccccagcgctattccctgctcaaaataggaaaccgcctcatcaaaccgctctgccgccatcatgcagagtcccatctgattatatatttccggcccggatatgccgctctcaatcgcctggctgcaaaacccgacggctccgtcataattaccggccgttctgtatgcatccgctatggaagagactgccaccgccgctccggccggagcttctttcctgtctttcgccgcctcggctgcttttgcataatcctccactgccgtgtcgggatttccggccatggcctcggaagcggctttataatacagatactccggttcttttccgtccacatccgcaaggatgccgtacgtatgcgccgcggcctcgtaatcctccagcataaattcagcttcgcccctgtatttcagtatatccagttcaaaggcatttactactccgtccgcttctttgagcgccagatcgaaggattccactgcggacgcataatcttcattttttacctgttcaattcctttaagcctggcctctttcgccgcctttgattccccgcagccgcccagtatcagggcagatgccgtaatcaccactgtaagaaccatcgctgctcgtattctcattcgtccgtacctcttaaatttctaaacggcggctccctctcccatctgaccggggatgcgccgctgcctgtcagctcctgccggtgcttccgtgtccgcctctgtcctcatgtcccagttccggcgcttcctcaaattcaattgccggctgatgttccatgatacggaactggcagatccggtcgcctgtatgtatcaccgtgtctctcagggcgtaagccgggaaaaaccactggtcattgtcaccgcagtaagtctcatcgatcactcccatatggttcgtctggataattccaaagtttttaaaggtgctgctcctcggaacaacgtgggcctcgtatccccgcggaagctccatggccaccccgagaggaatcagggcaaattctcccttttttaattctacctcctcagccgctctgagatcaatccagtcggattttcctgctatataatcgagtttttctattttgtcggtaaagtatttaattctgattctcattttttctgtctccttttctctgcagtgcagatcgattatatcattcttttggactgcggtaaagtttttccggttttagttaagcaggcgggaacgcctcattaccgttcacacggctgtattccgcgcacaggccaccgccttcaactgaaataagaccggcaggacatgccggtcttacagagtaaatctggtttaattttcaaggctgagacaatttcccggtccgttccggacgagtcacccctcttcagcttaaagaacattcatgaaggttgtaagcaccatcgagttaaagaagtcgacaaacaggctgcctacgagcggcacgatgaagaatgctctcggcgccggaccatatttttcctgaagcgccctcatatttgccatcgcgttcggcgtagcacccatgccgaagccgcagaacgcagttgtcatagccgcggcctcataatcgcggcccatgatattaaataccgcatagttggcatacaggaacattaccacggtctgaacaagcaggatgacaatcatcggaagagccagcgcggctaactgccacagcttcaggttcatcatcgccatcgccagatacaggttcagggagaggccgcccagcgcatcgatttcttccatcggaaggtcggtgttcttcgcatcccatatattacggatcgccgccgcacagagcattgctccgatataagcaggcattgtaagtccaacatttttaaagaaagtaaagataatcgtaccgataccgattgcaactgccaaaaatgcggctgcattggtaaatttctgtccgtcgatgggagatgcagcctcatccactgcgttgccttctgcctttgccgttgatttaaggccaagcttctcaacacgcgcccttgcaatcgggccgcccatcatacttcctgatacaaggccatatgtagctgctgccagcgcgaccgtaagcgctcctgatacgccataggtctcttccagaagaggcccgaaggaacctgaagtgccatgtccgcctaccagcggcatggatcccatacaaagacctaaaagcggatccaaaccaaatgcggctgccagtccgcttcctaccgcatcctggataatacacattccaaccgataatgccaggaatatgaatacctgaatgccgccctttttcaaaagccggaaacaagcggtaaatcctacactacagaagaatacggtcatcaggatcgtctgaatcgttgtgtcaaatgagaactccaggactcccgccccgtaaagcgccaaatgtaacagtgcaaatacaattcctcccgctaccggtgccggtatacagtacttgctgagaaaccccagcttctttaccataaaccttcccagacaatagacaagtgcccccaacgcacaggcctgatacatgtcaagctgaatagtcatcatactaactcctccttctcacttacgtttgatgtaatcatttttctcccgccactacaaaaagctacagaatattacaccacttatccgttaaggatatgataaaggaaaagcccgtatatcaaacatttgtttatcgttttcttaacttcacttaacaaatctacattcagaaggcatttcagcgtaacagttcagcagcatttaccgtcacgtcctcctccttctcaaatatgaatttatacagtgtctggtacaggcggtccgggtcgataggttttgcaagatgtgcattcattcccgccactttactcttttctatatcttcatcaaaggcatttgccgtcattgcgataatcggaatatacgccgcatcggaattgctgagatggcggatgctcaccgccgcagtcagtccgtccatcagcggcatcctgatatccataaggattgcatcataatagccctccggggatttgctgtaaagctccattgcgcgaagcccgttctctgccgtttccacaaaaaagcccttgttttccagcagcatgaccgctacctctgtgttgatggcgttatcctctgccagcagcacgcgtttcccggcaaaattatattccgtcttttcttcctcccggcagacctgctcctccttctctcccagggccttggtaaaggcagagaccagggatgacttgaacatgggcttgctcatcagcagattcactcccgccatcttagcttcctgttcgattgcgctccagtcataggctgttatgataatgatggtaacatcgggaccgacaattccccggatccggcgggccgtctcgatgccgtccatccccggcattttccagtcgattaaaatcatgtcataatatttcttattttcgaggagggttttcaccctctccacagccttttgtccgctgtccacccactcggcggtcactccgatttccttaagcgtcacgatagcgctctcacagacagccacatcatcatccacgaccagcgccttcaggctggagaaatggcattcatgttttttctggcggtgccggagcttttcatcctcggtaattcccagcttgacatccacggtaaactctgttccgagtcccttgatggagcgcacggtgatttttccatccatgagatccacgatgctttttgaaatggcaagtccgagcccggttccgccgtacagcgacgttgtacccgtggattcctgggaaaacggatcgaatatgtgaggtaaataatcttcatccattccaatccccgtatcattgattacaaagcggatcaccgcatcatttttcattttccttttaacggctgcggaaaatgtgacttttccgccctctctggtaaacttgattgcatttcccagaatgttgataagcacctgctggagtttcattgcgtcgccgatataataatcgtccagcaccggatccacaatgcattcatattccacatcttttaccgcagcctgggaatagcagatggaatttattccgtttaaaaattcctccgtcggaatcttgtcattcttcaggagcattttcccgctttcaatccggctcatgtccaggatatcgttgatcagggaaagaaggaatctggatgaaatcccgattttagaaatacagtccgccacctgctcgtcatttcccagcgcctgggccgcaatggcagtcatgccgatgatggcgttcatcggcgtcctgatttcatggctcatgcgggaaagaaagtccgactttgccgcattggcctgttcagcggcaatcagcgcggaagcaagctcctccttctgcctctgttcccgccgcgcgacgtccgtcacatcggtacgcgtgatacatactcttcccagctctttgctgatataaaacgcctgatatcgtttaacccgcaccgatccgtcgtcctctttcaattcgagtacaaagctgtaggaatcctgattttcaagctgttctttcatgtaagtaaaattcatcttggccagatactcttcccgcgccgcttcatccatgcaccgttccgctacattccggagcgcctccaggtattcgcccttttcggagaccgtattggtcagcccatgtttgaagttgataatccgccggctgcctttaaccatatcaacctctgcaatggcatcataatccagggaagcgattgtacctaaaagctgctcctggagttttgcctccgtgatatccttagtataaaaaaatgcaatgacatcccctgtttcgggatgcaggcaggagctgaatccggtactcccccagaacaattcccctgcctcgttcctgcggaggaactcaaagctgtaattaacctttcccgccgcataatccgccaataccttcttccggttcagcgcgcaaagaatcttccttccatattccgcgtccaccgctgatgccgccagattttctataatctcatcgtaggtttcaccaatccctgcgataggcaccgcagtgcttgaaagataattctccacccggtttttgctgacattcaggcggccctgaagacagcctcccactgaagaaatctctgcaaaataagacagctccttttcgtaaagctctctcacatgcttctgaagctgtttttcctcggtaatatcgaggcagacgcaatagaaatgcctctcaccctgcagttcggagaacagctgggccttgaccgacacccatttcacgcttccgtccttgcagacaagccggttttcattatgtatcgtatttccgtgcagcagctggctgctcagtttgtcagccatcacggacagatcctccggatgaatgactgccgacatccggttccccatggcggcaaactcttcccgggtataacctatatattcaaacaggccgtcattcgcgtcaatgactgagtaatccgggtcaaagcggcagcggaagacagcgccgggtatattgttataaaggttcattacctcctgctgtgcgtgtttctgtaccgttatatcaaggcaaaccgaggagatggcaagacggccgtcctccgcagtcaccactcttcccagatcgtgaacccagatataagaaccgtcctttttcttcatccggtattccaccacataccggtcattctctctgatctgggactcgacctcttcatcgactctccgcctgtctcccggatgcatacagttggacaccagtccgccgatatcttcgacaaactcctcctcactttcgtagccgagatagtttaacatctgcttattgataaaataaaaggggaatccctcgccgatatatcccccatcattccgccgggtacggactcgttcagcagttcctgcctttgtctggcaatgctttccaccacaagcgtcagaggataatgctctccctccctctggctgctgcccggctcggcaaaatgaaggctcttgatccgccagccggattcttccctgaccattgtgaaaaagccccgcagaaaccagccgtaagtcgaattcttcaaactcatgtttaccgacagattatacacattctctgtaactgcctgctcataaatggcggaccattcacagacaaacggttccggtatctctctgatatcctgatgaagatattccctcatctcatcaattcccctggcaaactcattgttaccggttcccacaaattcaatatcttccgtcaaaaaacgggctgctccctccgggtcccgcaattcaaaccatctgtggcaaaactcctgtattgtttctctgattatatttccgttatccatctgccggcattctcccttttatatactttccgttccgctcccctttttcaggaattatgtcgaaataagtatatcattgataccggtataaatcaacggtgcccttcacaaagccttccccggccagtgcacactgccgtttccgtttattcctgatgaagaatcaccctctttgcctccatgcttttctttacgcggattacgcgctgatttgaacttcctttccatttcagtgagctgtccgccagctcttcctcaaaccggccgtctaccagaacgtctataaggccgatatatggaagatcatttatctcttcccaggtatatcccgtatagagccatatggttttgtccggaaactcctgcttcactttcctgataagccttcccgtctcttcacggtttccgggatagagcgggtcccctccgctgaatgtgatccctgaaacatagcctttctcaagctcctttgcaatctcctgccacgctgcttcatcaaaaggtattcccccgtccgcatcccaggtaaccgggttatggcagcccttgcagccgtgtttgcagcctgcggtccagaggacaacccgaaggccgtccccattgagcatatcgtcttttgtaatattatgataatgcatttctctactccaatctgtcagttccgttatcccgcccgtcggctacatggatttccgttccgctatctccgccattttcgcctcatttaagcgtgtatccccttttacacgggaataactgaggtacccgttcatcctgtctattttcgtcagattgctgctgccgcaggccgggcagacatccatatccagctcggaatggccgcagtcatcacagtaggaaagagaaagattgactccctcataaaatcccatctccatcgcacggcgcaccagtgtcctcactgcttccaggttatagtcgatcggatattttacatactggatttttcctccgtttgacagctcccagaaacgatattccagattctgcttctgaatcggggagagatcctccgtcacgtggcagtggaaaccattgctgacatactccctgtcggaaacattttcaatgataccgtattttttacggaattgcttcacctgaagcccgcagaggttctcggccggcgtcgcataaattgcatacaggttgccgtcggccttcttaaattcctccaccttctcattaatatgttccaaaacctccagtgcaaagctgccgtcctccaccagagacttcccgttatagagctgctgcagctcgttaaatgcggtaattccaaaggaagccgttgccgtcttaaggagcggttttatcttgtcatgcagacccagacggcctccgtaaaatccgccttcgcagtaggccagcgggttggtggaggccctcatctcgcccagataagcataagtccggatatgaattttccggatcagctccagataataatcaagcacctcataaaagctgcggctctcctgccttgcctttgcaagaatcattggaagatgcaggctgaccacgccgatattaaaacggcccacaaacaccggctcatccttatcatcggccggggtcatgccgcccctctcaaaccagggggataaaaatgcccggcagcccattggtgaaataatttttccgtattttttatacatgccggcaatatatccctccccggtcagagagagccagtccggatacatggtttttgcagaacagctcagaccggcttcaaatacatcctccagttcccctcccggcccatgcaggttttcatcatacaaaaataccagtttcgggaacaggaccggttttttgcagccggccctgccctcaccctttttacgtacctccagcatcgtgattgtcgccatttttgcaaaacggcttctgcccgtccctgcggtcattgtgataaaaggataatcgccgcggctggaggaaacagaattaaatttatattcccatccctggaagccctgttccatatcgcgtttgatatcggccatggccacatcctccgccttccggcaatcaagtcccaggcccctgtatttttccacgtatttcccataagacttttccgcataaggagccaggatttcctccacgtttggcaccgtaaaaccgccgtactgctggctggcggcgctcaggacgatatcgccgattacatcgaacgccacatcgagagtcttcggttcattataccagaggttccccatctcaaagccgccgctcagcacgcttctgacatcgaaaagacagcagttcatcgtatcgcgccgcgccgacatgtcatggatgtaaagatatccgtcgcggcaggcctgcagttcctccaccgtcataaagaacttctggtaaagcgatttattcagttcattgaaaatcaggctccgtttcgttgagaccagggcgctgtcggtattgctgttctccttatctccgatatacatgatagactggcttttcttatatacatcatccagcatctgtacaaaatcctgtttgtaattgcggtaatcccggtagctcttggcaaccgccggattcacccgttcaagcgctccctccaccagattatgcatctggaagatcgggatccggttatcctcaagcttctccaccttttcctccacaaaccggcagataaatgtgatctcgtcctgagaaaaccggatcattgccctctccgccgacttatgaaccgccactaccactttctggatattaaaatcttcccttgtcccgtcttttttgattaccttgatctctgaacccgtcatcctgctctccttttatctgttgtcctgctcctgtcccgctgccgggccttttattccgctgaaattacggtttataactatatgtagatatttcatcccgtatccatctatatacggtgtcgtttcaaaaaactcacggtacttatcctatcattcccagcggccccagtcaagcaaaaaaagaatgggcggcctgccgggcataccggcgggagcgctcatccttttaatccatattttcacaggcggccgcagcctccataattccatcctcctgcccggaagaatcttcctgcagtacgccttcgatcttaagctcctcctccacctccaggcggaactcatccacccgtccagggtttatctccggcagctgctccgtggagcccacgccaaaacggcggagaaattcttccgtcgtggcaaaaagcgccggacggccgggagcatcgagacgtcccacctcgtagacgagattatattcaatcagccggttgaccgcatgatcggatttcacgccgcggatcttctcgatctccagctttgtaatcggctgcttataggcgattatggaaagcgtctccaatactacgtccgtcagtacctgttttttgggggcggaagccacctgtatcagattttcatagtacttcgccctcgtgcacatctggaagctgtcctccagctctataatctgcatgcctctctgttctctttcataccgttctttcaggcgggcggccgcatccttcgcagactccacatcgcggcccagcgccgctgcaagctgccggacatctactgacttacccattgtaaacagcactgcctccacgattgcttcgtcctctgaaaataccatgttttcctgttccatcttttatctcattcctgttcttcaaaatcctccaggccatccagcttcagttcgccttcttctccttcgggttccagagtctctatgtacatgtcgtcaaataacgcttcctgggtgagcgcgatctttcccattttcatcagctcaagcaccgccagaaaggttaccacaacctccaggcggcctgtctgtttttccaaaatctgccggaagctgaacgtcctgtgcgctcttgcatacatcatgacagaaccaattttctgttccaggctcaccggttctttcttaatcgttccaaagctgcttctcacgggatcgatcttgtcttctttccgtttcatgacggaatcaaagattttctgcagctttgcgagcgtcagtccgtcgagaaggctgtctaaatccaccggaggctcatatttcgccacctctctggggatcgtgggttccttaaacaggtgcctcattgcatcctgctccctctcctccagctccatagccatatacttgtatgtcttatattccagcaggcggcgtaccagttccgccctcggatcctcctcgtcctcttcctctgattcctccaccggcaacagcattctggattttatatcaatcagggtggcggccatcaccaggaattcactgacaatgtccaggttctcttcctccatccggctgacatagtccaggtactgctgcgtaatcagcacaatcggaatatcatagatactgactttattcttttctattaaatgcagaagaagatcaaggggaccctcaaaattctccagcttgtaggaaattcccatttagattccttccatcctgtctccatattaaatgcggcataaaattacctcgagggatacaggccgtgaataataactaaaattaatccccggcctcctgatagtatatcaaagatggattttcaccgcaacctgatcttcaccgcgggttgtccggatatctgctgccgtaagagtccacacggccagcgcagtaaatgcgcagacctgtctgaactgttactttggttccagcgtgatatggattagctggggcctgtcgttcagtctgatattgacggaatgtgttccaagcccgcggctgacaatcattgtttttccttctttgtcaaacctgcctgcacaccagggaagaaaaaactggtactgcggggtcattaccccgcccagcagagggaggcggatggtccctccgtgaaagtgccccgacaacgtcaaatcggctccccagtggcggcagttattaaaaaacagcggcgaatgcagcagcaggatttgaaacctcgactgatccgccctgccgcaatggcgctccagctcattctccggcagaaccggaagcgtgaaacggtgtcggtaatagatttcttccatattacagccggtaatccggatatccgtaccaaaatcggcgctcttgtccgacagatagaaagcccccgcctttttaagctccccggtgaatttccggtagagaccgccgtagaccgtcctctcccttctcattctctcctcatggtttccattggcataatagaccggataacgtgatgccagttcccttacgagtgacagcgtaacacgcaaatctgcctctccccttgaaaccatcatatcgcctccgatcaggacggcatccggatgaattctgtctatttcttctatcagcagtctgttatttactccaaactcattattatgtagatcggaaagaaacacgaaatcccgcttctgtcccttaattttctttgaagaaatgcggtagtgatctgtcacgaaatgtttcttttcgtattccgagcgaaggatcagacctccggccgcagccgccagggcggcaatacatgcataaagcataacttcctcctatatttaacaggctccggccagccgcctgtaagacggtgtggccggaagcatgcctgccgctgtacggcaggatatttacagtaatttcataattcaaactgttacgtttcagcagctttcacgcaggtttgcataaggcgcctgttccaggcggatgaagtatccctgttcatgttcacatacagggcagtattttggagcaatctttccctcataaatatagccgcagttcagacatatccattccgtatcttcttccgccgcaaaaagcctgctgctttccagcagattggcaaatattccgaagcggtctccatgcgtcttctccacatccgcgatcatatggaaaacatggccgatgcggtcaaagccctcttccagggcaacgtcgccgaactctttgtacaccacatcgaattcttcgaactcattatgctctgccgccctcagaagatcaatcgtcttttcatacatatcaaccggatagcctccgtcaatatgaattgtctctcccgtcatttcttttaaaaacttatagaatacttccgcatgctccttctcctgttcggccgtgtataaaaagaccttttcaattaccggaagtccttccttctttgcaacggaagcggaaaatgtgtagcggtttcgcgcctggctctcgccggcaaaagcacgcatcagatttttagctgtagcgcttgttttcagaacactgtccatcaaattattcctcctgattcatttgttggtaatagtttctccgaaaacaggcaatgtataccaatcatcatacacttaactgcaaaaaatcgtcaagctgtcttttccccaagacgataagtcgccgtcgcctgcacggaaaaacgcataatattgacatatcccaattatggataatatgcaactaaagccgttcagtatttaatgatatgggaggtgcagataccttgattacttatgataaattgtgggaaaccatgaaggaaaagcagattacacagtaccgtttaattaaatactatggctttagtgccggacagattgggcgtttaaaaaagaatatgtatgtctccacccatacaatcgaaacgctgtgcagcattcttgactgcaaggtggaagacatttttgaatataaagcagatgagacgttctgcaaacagtctcccgagccgtcctgtgatgaatcctttaaagcggttatggacagtgagcattaaatcatccttacggctcagctttctttggcaggctgttttctccatacacacaaattccggcttttttcaacaggcgcactgttatgccgtctccgggtatcagcttttttgaaaaagttccgtcatatatgaaaccactgccgcaggaagggcttctctctttaagcaccgctctccggcagtttttttcgcgtgcaatctgcagggtttcttccgctccccttacgtattcctccgtcacgtcgcggccgtcctttgtaacgactctttcatccctgatttcagcgggtgtccgcggcgtccggagtcctcccagcacttccggacagacggggatgatctccgcccccgtgattttcagatagtcaacaacactctggcagtaattggattcaccgctgtatttacatttctcacccagaaggcaggcgctgacaagaatcgtttccccgcgctcttccctctgctctctccccatatccctgcacatattggcatctcctttttaattatgaaactgcaaactggctgttataaagttcactgtaaaagcccttttgggccagaagctcctcgtggctgccctgctcgattatccggccatttttcattaccagaatcgtatctgcctcgcgtatcgtggatagacggtgggcaacgataaaactggttctgccctccatcatcctcgcaaacgcttcctgtatcataatctccgtcctcgtatcaatggacgatgtcgcttcatcgagtatcagcatgggcggcaggcagagcatgacacgggctatgcacagaagctgtttctgcccctgcgacaagttgccgccgtcttctgagataaccgtatcatagccctccggcatacgcataataaagctgtgggcatgcgccttcctggccgcctctataatttcctcctcagcggcatccggttttccgtaggcaatgttttcgcggatagatgctgatttcagccatgtctcctgtaataccataccgtatcccgcccgcaggctttctcttgtcatattgcggatatccgttccgtccacccggatcgtcccctgatccacgtcgtaaaagcgcatcaagagattaatgaccgtactctttccacagccggtcgggccgacgattgcaatcctctctcccggattcaccgtaagatttaaatcttcaatcagtctgacttccggattataggagaagtatacatgctccatggagacattgccctccacctgtccgggagcagcggctccctcggcatccgttaccgtcggctcctcgtcaatcagttcaaaaacacgggccgccgaggcaagtgcattctggaattcggtggcaacgcctgaaatctcgttaaacggttttgtatactggttcgcataattcaggaaagacgtcagctgcccgacggtcagtactccgcggattgctgcatatgcaccggccactccgacgctggcatatacgattccatttacaaagcgcgtagccggattggtaatcgaagaaaaaaatatggccttcaggctgcagtccgcaagcttatcgttaataatgccaaaccgcctggatgcctcctcctcatagccaaacgcctggaccaccttctcgttttccagaatctcattgaccagagatgtcatatctccccttgcctcagactgggctttaaacatataaaatgtttttttggcgataaaaccggccacaaacagggaaaccggcgtaagtaccacaacgatggcagcaattaccggattgatggaaaacataaacagcagtgtcccggctatcgtgagcagtccgctgaacaactgggtaaatcccatcaaaagcccgtccgaaaactgatccacatccgtgataacacggctgagcacttccccatactgatggctgtcaacatatttgaggggaagcttctgtattttttcaaaagcccggatcctcatatcctttaccacgcggtatgtgatatggttattaattacattcataagccactgggcaagagcggtcagcaggatggtgataatcatatgtttgaggatcacagccagccccgtgaagttaaccagtccctgtgcaagcaccagatccaccgctttaccgatcagaatagggatatagagcgtcaaagccaccgttattccggccagaagcagcgacaggagaaccatccatctgtaatgtccgatatcctgaagcacccgcttcatcgtatgcttctgcttctgtgtcttctctttgttttcttcctttaacattactggttcacctcctcgcctgaaagctgggacagacatatctccctgtataccgggcaattttcaaacaattccttatgctttccgatccccgcaagcctgccgtcgtccagaaccataattttatcggcctgttttaccgtcgtcgcacgctgggagacaataaatacggtcattccatccgtcttctccctgattgcctttctgagtcttgcatctgttgcaaaatccagggcggaagcgctgtcgtcgaggatcaggatgtccggctttctgacgatggccctggctatggtgagacgctgacgctgtcctccggaaagatttttgcctccctgcatcagacctgcgtttaaaccgccctgtttgctctccacaacatcttttgcctgggcaatctccagcgcctccataatctcctcgtccgtcgcatcctgcttaccccatttcatattatcccggatgcttcccttaaaaagtaccgcccgctgaggtacgacgccgatacggccgcgaagctccttcagtccgtattccctcacatcggtaccgttaattcggaccgcgcccccagttgtgtcgtaaaagcgcggtatcagattcacaacggtgctttttccggctccggtacctccgataattccgattgtctcccccttcatcgcccggaaatcgatgtcggtcagcgattctgcttttgcccctttataagcgaagctcacatgctcaaattccaccatgggaattggggcgcctgcctgatcggttcccgcaggattcatcgggacctccggtttctttgccctgttttccacaatactgctcttcgtctcaaaaacattattaatacggccggcacaggcaaaggcctttgtcatcgtaataatcagattggcaagcttgataagctcaacgagaatctgggacatataattcaccagtgctaccagctctccctgcggtatgacgccttcgtttacctgtcctgaaccaacataaatcaggaccacgatagccagattgataattacataggtaatcggatttaaaagagcggaaatctttgccacgaatatctgaaaattaaatagcaggccgctttctttataataggctgccgtctcgtcctgctggcggttgaaggccctgaccaccctgactccggtcagattctccctagtcatctgcagtacccggtcaagctgcttctgtacctttttatacagcggcatgctgatgaacataattccaaacacaacaatggaaagtaacggtatcgttacaacaaacaccatagccgatttaaaatcaatggtaaacgccatgatcatggctccgaatacgataaacggagagcgcagaaaaaggcgcagcgtcagattcactcccgactgaacctggttcacatcgctggtcattcttgtaatcagagtagccgttccttccgtatcgatttctgtgtaagaaaaatggttgatatgatcaaaaagctcttttcgaagagccgtaccgaatcccaccgccgccttcgccgcaaagaactgggccgtcagcgaacaggccaatccgataattccaaggagaatcagaattcctcccattcttaggatataaggtaaatctccatttctgataccggtatcaataatctttgccataacgagcggtacaaagagttcaaaactcgcttccagcatcttgaacaacggcgccataaccgcctctatccggtattttttaagatatttcatcaaacttcccatggtgattcccctgtcctgtatctatgatttatcgttctcttctctttatttcatctatctttctataaagcttcctgcaattttgcactttattttaacacaacaatgcggcggcttcaagtagttagtctgcgggtattaaggctttgccgcttcatttttggcaatccgggatacaaatttttcccttcgttgctatttttccgcccgcatggtaatattattagtaaatgattttcccgattggaatggagatgctctatgatttatttcattttacagtgcaagaaaatttatgacgagtttgtaaaggatgagatcacggtctatgcggctcaggcctcattttttattgtcctgtcattctttccctttatcatgatccttcttacagtgattcagctggttccaaccatatcccaggcagatcttcttctggtgatctccaggctgtttcctgaaaaggtatatccgcttgtggaatcgattgtaaccgatctgtacaccacggctccggctgctatcctctctgtgactacgatcgtcaccatatggtcggcctcccgggggatgatgggcatagaacgcggcctgaaccggattatcaactgcagcaagaggaggaattatgtgatcagccgcctgattaattccggctacaccgttgtctttatcctggtctgcattatgtcgcttgtactcatggtattcggcacttcgctgcagaggctcctgcttcgctatctgccgatactggaacatattgccccatatctgctcagtatccgcgccctgattgccctggccatcctgatcgtcttttttatggggctttatacctttctcccctttgaaaagctggagcttcgaaagcagctcccgggagctttgttctccacggccggctggattgtctgttcctatggcttttctatctattttaatcattttaaacggttttcctatatgtacggcagccttgccgccatcgttatcttaatgctgtggctctatttctgtatctgtatcctgttccttggagccgaggtaaaccagcatatgcatttcggcagaaagccatgataatgcctgtcccggatgcctgaccggacaatggtatgtaaaaaacggagcattgtcccttcaggggccgccgctccgttttttagtattcttgtcaggtattcttggctgccattccggctcttaacgatatttctcccgcagatattcaatataatatttgggggtaaaatcctcgcccgtcacgtccttcagaatctgcctgctgtctttcagtttcccgtactgatgaatcttttccctgagatatttcctgattgcttccagcttgccttcccgaagcagttcttccacatccatctcctgtttcatagtgtggtaaatctgtgcgccgaaggcgcttcccagggcataggacggaaagtacccaaaggatccctgggaccagtggatatcctgaagtattccctccgcgtcatttttcgggctcacgcccagatattcctcatattttttattccagatggccggaagttcgtcgatttccacgtcctcttcgatcatcattttctcaatttcatagcgtaccagcacatgaagggcataggaaagctcgtctgcctctgttctgatgagtcccggaaccgtcttattgaccgctgcaataaaggcatccaggctcacgctctttaacggagtcccgaacatatccgccaccgtatcgaaaatcggctcccaaaacgccttgttcctgcctataatgttttcaaaaaaccgggactggcactcgtgcatacccatggatgctccctgcccaaccagtgtctgggtcaggtcatcgcgtatccccagttcataaagggcatggcccgtttcgtggattaccgaaaagatagaggaatcaatgctctctccatagtgcgttgtaattctgacatcgtggttgtgcagatttgttgtaaacggatgggcgctgacagccagcacacccctgccgaaatcaagtcccacatattctgccagaaaccgggccgcttcttcctgcgcctgctcgggataatcagcggtcagaaagctgtcatccactttctttgaccgctctgccgcatcatgaagcataggaacaatattctctttcagttcgtcaaagaaacggtcgagcgtttccatatcgaaacctttttcataggaatccagcatcacattatacagcttctctccgtcttttgcgcggtaagaagcaaatttcttctggtagcctacgatgtccttaagcaccggagcaaattttttaaagttcttctcttttttcgcctctgcccatattctggtcgccttggaggtcaactcggcaaattcccggtattccctgggaggaatacactgaagcttttcaatttcttcggccgcctccctgacaatcgcctgctccgcctctgtaagcccctgctcattccggcaggcgtcaaccagctccttcacttcttccgatatcataatctccatgtactgtgcagataaggagccgattactttcgatgtaaaaggcgccgcttcctttggagccaatgtttcattatcccactcaaacagcaccattgatgcctgtatcgccattgctttttccaaatatccacttaatttttcaaatgttttactcatatcttctgtctcctctgttaaaactgattatggattcgttgttattaagattagcatattttcaataaaaagaacaggaaattaatagcagtagtaatgccaccttgttttcacatagacgccttttccctgtctgccgcccgactgccatatgacattggccggaagcacgctgccgttttcgagaagcgtcctggcatttgcccagttgcgctccgtcggctccctgtaataatttccgtcccttgtacaggaatactgtcctttctggaagacaactcccttgaccgtgtttggaaatgaaggatgattttttctgtttaaaacaacagagcccacataaagctgttcctgatccgggcagctctggcattctccggccagcacatgagccatcacgtaaagatcttcctccgtataggccgccggctgtgccgccgcttcctcttccccgctctcaacagtctgagcctctgagccgtttccgtcctgtgccgccgcttccgttcccgccgcagcctccgccgccggtccataagccatagccgcagcaggttccgtttctgtctgctgctccgccgtctgttccgctgcgatctgttctactgccgtctgcactgctcccgacgtttccccctccgccgcaaacaaggtcccgggcgccatgtacaacagtgtgataaccggtaatatgcataatatcttcttaatcatagtcctccttaataaattgatttcagtttctttaccaatatatgtcaattcaattaaaaatatatttattattgtacaaactggagatttaactgaggtttggaggacgcgtccggaacggaccatgtccggtgtggtgagagggctggctgagtcttccgtccccgtgggaagttggtcgcggaggggaatccggccagaatgaattgctgcggggaccgtttgcactctttggagtgcgcatcggaatgctaagctcgtgaggaacctcgccaagcacagcggactcccatgtcccctacgcaattgattccgcctacttccccggggcagattttcgcctgggacggaagactcaggcggaggttttcgcggcaccggacatggtccgttccgggcgctgattgtctctaaccttaaatggggagaaccctgtcgcgaccactacgtgttaacgcgtgagacactcagcggccgcaggccagcggacggggccgatacacccggcggagtcttccgttccggcgaaaaccttccgggagaaggagatactgccgacatcttccggcggagaaggagagaatgatatccggctccgccctgcgaaaacaaaaccacagtatctccttctccatccagcgatgccaaacccccgggacgaaagactcataaaacaatcccaccaccccgtccgctggcctgcggcggcgtcctcacctgcttatttaaatcttgcatattatcagaaaaagcgttatacttgatgcaatataagctaacacaccaggaggaattgcaatgattgaggcaacgagctgcggcggtgtggttatttttcgaggtaaaattctggttttatataagaattacaagaacaaatatgaaggttgggttttaccaaagggaactgtagaaccgggtgaagattataaagaaacggcactccgggaggtaaaagaggagacaggtgtatcggcctccatcataaaatacatcggtaagagccagtattcgttcaatacgccacaggatatggtggaaaaagatgtgcactggtatctgatgatggctgacagctattacagtaaaccacaacgggaggaatattttatcgattccggatattacaaattttatgaagcctaccaccttctgaaattctccaatgagaagcagattctggaaaaggcatataatgaatatctggacttaaagaagagtaatttatggggcaataaaaaatatttctgaagaaaggcgggggacatcgaaactgtaacgttacgatgtcccccgccttttcagattgtctgactgcctgtaaaatacaagtacggtacgttttcatcaaactgacttcttcgccagttcccttatatgacgatttttcctgaaatacaggcaggttaacacacccgcggctcccagtatggcgtacagcattgctgcaccggagccctttccggttccgaacagcgctgtaaacacgctatccggtccctgtaggctcataaacggctcaaagacacgatccaccagggcgcctcccagcagatatcccaccggaattgtaaaaaactgcagtgaatttcttacggaatagacccttccctgcatctccaccggtatatggatacgtagcagaacgtctaaattggcattcatcagcggtatcatcagccagccgagaacggcgccgaaacaccacaccggcatactccggccaaatgccagaaaaaagttctccgtacacatggaaaacatcagagaattgcaaatgaccctgaccctgtttttgggcgcaggcagtgcggaagcgaaaatgctgccgactagattggcaaagcctgtgaatgtgttgagggcacctagcgccgtcttaccgcctccggctctcgataaaagcatggcaggcagcgctgcttcatagacggaagcgatcaggttgacagctgacagaaagagtatcagtccgagaatccccctgttctcctgcagaaaatgcagcccctctcccgccgatttcagaaaagactcacgtttcttctccttctccactttcggtatgcggataaaaaaagccagcgagagaaatgccgtcccaaagctcatgaaatcaaacaggataaccgcatccattcccgcaaaagccaggacagccgtcgctatcatcggcgtcagtatcgttacaagggagttggaaaatgccttcaatcctcctatccgctgatactgctctttcggagtcagcaggcttaccgccacctccgaagccggctgctgaaccgaattagccatgccgttgactgcgttaatcagataaagatgccatatctcaagacgcccgccttttaacagactccatacaatcagggtcattaaagccgccagcgtatcgcacaccagcatggttttcttcttgtcccaccggtcgctcaaagctccggcaaagatacttaacaggacatacggcgcataagagcagactgccagcagcgctgttgtaagtgccgagccctgcctctcgtaggaccatataataagtgcaaaatttgtcatggaactgcccagcgatgaaaatgcctgcgtaccccataatatcaaaaaggcgttaaggcctttcagagtttttttatttattctgttttgtttatttatgaaaaacatatgactttgctccttttatctttttattcagatagagtgcaaagcctgcaggacgtatttactccatgcagtccgtcccgtatcagaccttgcatggagctgtgtcaatgcatagtttcatatcagttttcctcctaaaaaaacatttcgcaacagttcagacagcatgaactgttacagcatttcaaatatcagtttgactatcagcaccgcagctattacaagcatcatcggacgtatgaacctggctcccttccggattgccattccggagcctgcgtatccccctaaaacgccgcaaatggcgacgggaagcgcataattccagagtatcttccctgccagtaaataagaaatcgttcccgccagagtggagctgaaaacagctaccttggcgttgccggaagccctggtcaaatcatatttaagcagctttgtatagattattattgccagcgttccggagcccggaccaagcataccgtcataggctcccatcgcaatccccgtgaaaatccagaggccgattttcctgtttcccgtcacttcgtcggagtgatcctctttcggatactttttattaaccagaatcaggatcgcaacaaaaggcatggagcccagcagcatcaggctcaaagcccggtccggcatccaaagcacaatctttgaggcaaggacggaacaacagaacgtaacggctcccacaaagaacgccgcctttttgtcaatcaggttattcttcagataccgtcctgccgacatagccgtactgatattacagcacagcttattgcaggcataggcgttatgtacgggcatgccggtaaacaggtaagccgggagggagagaaggcctccccctccggaaattgcatccacaaaactggccagaaacataatcgggcacaaaaacaataatgacgttatataatccatactcatctccagtaacattgaattgttgcagcagttcagccgtgatgtattcgcgaggtgttttcgcgaaacagttcagacagcatgaactgtttcgtttttgctgttatttgcgaaaattataactattgttgtataaccggggaattactgctttgcaaaataggcgtcaaagaccgcccttgctatcggcgcggccacctttcccccgaaccggcttcctccgcaatcacactgattgctatcttcggattctcagccggtgcatatcccacaaaccaggaatgtgtctctttccccgtctcaaactcagccgagccggtctttcccgcagccgtataccggtctgttcgcagcgcggaacctgtgccaaaatccacaacgctcttcagcagctccgccatcatctgggcatcggttgcagatagaggacttccggccgacgagggcaggaacttcttgaccgtctggccgcctacgttctccacatgatcgatcaggtacggtttcattaacgtgccgccgttggcaatcgctgaaacaatcaaaagattgtgcagcggcgtaatctgcgtcttgccctgtccgatagacgtttggagtttttcccattcatcggccccgcctgtcattgtaaaagaactttgattatagggcagtgcatatggcagcggcatattaaacaggagctgctccgccaaagcgtggaaactgtcggggttcagctgaaggccaatctctgcaaatgccccgttacaggaatttgcaaatgcctggatcagattctgctgcccatgcgattcactgtgataacatttaatcgtatattccccggtgtgatacgctccgctgcagttaaaggaaaaatcctgccaggtggaagggttttcccggatatattcaagagccgttaaaattttaaatgtggagccgggagcatacagtccctgtgtcgcacggtttacaagctgcgccttcgtgttatccggcgcaatcagctcctgccacttctcatccacctggtttgcattaaaattcggctgcgaaaccatacagagaatcttccctgtatccggttccatggcaatgaccgcccccctgttatttcccaatgcgtcggaagccgtcttctgaagatccagatcaagcgtcgtcactacattgtctcccagattcttctcaccgcgaagctcattaatcaccttctccaccagattgacatgtgaagaaagaagataaaaattagccagtgattcaatcccggttttaccgttcaaaccagaataacccacggaatgaacgaacaggtagtcaaacggataatagcgggtctctgttttgtcggaagcaacccttgtttccgccagaaccgtcttgtcgctgctcagtatacttccccttataatccggtctgaaaactgatccagccgtgcattgtatgaactgccaatcacattctcactcttaaactggataaaccagccgaggtatgcggccatcatgataaacaatgcggcaaacccataggtgagctttaatatatttttattggccttcgctctgctgtcaccggaatccctgcgtttcttcgtatctttcttctttccgccggggccgaagcgtttttccgtttttttctcttcccgggagccatgatctttaagcttcataatcttcctcctcttcttcatttctcttcaggataaaaagtccctgaataacgccgaacaggataaacgtactcaaaatcgagctgccgccatagctgataaagggcagtgtcacaccggtggacggaatgaacttgatgacgcccccgatggtcaaaaacacctggacgatgtatacaatgccgagtccgaaagcaatcagcttgtaaaaaacggcctgcatcttcgtcgcaatcagcataaactgaagaaaacatccaagacaaattaaaatgatacagagggcaaagatgcctcccagctcttccgatatggccgcaaagataaaatccttctccacaaccggaatcttcttcggcattccctgataaagccccattccaaaccatcctccggtgccgatggcaaaaagcgcctgtgtaacctggtaaccttttcctgcaatgtcgttccatggattctgccaggcctccacgcgcacccggacatgggaaaacaatttataagccactgctgccgccatgacaccgcagcctgcgcccgcccccagataaaaccagttcgaagttgcgataaaaaacatcagcagataggtaacgaaaaaaatgagagcgcttcccaaatcctttgaaatcaccagcaccagcacatgagccgcggccaccaccgtcgtaattactatcgtcctgaaatcaatggagcggtaaaacatcgttgcaacaaagaaaacaaagctgattttgacaaattcagacggctggaaagaaaacccgcccacattaatggacagctgggcgccgaagctggtacttccgagaacacagaccaccagcagaagaaaaagaccgattgagccgtaaacccaaggaatcttagcaagctgccacgttctgtcgatgataaacggaatcagcatagttactactgccgccaccgcggcaattacaaactgcctgaccgccctgtcaaaggaaattctggacagcataataaaactgacacacaggagcatgcaggtgttattcagaagcagtcttgataaattgcggtaaaacatcctgtagaagacctgataaagcaggaaaaacagaaactgggctccgaaaaacatcagcatcttctcttcctctgtcctcaaatagatcaccgcataagccagcacatggataaaaagcatggcagcattctgaagcctgcacaccctgtttctggaatgctcatccggcatagcaaaaaatcggaaattatagtatgtgtaaattgctatcagcagtatcatcagatactttgataatgttgtaacaagattaatcacactctcacctactcgatccctcgtttaaaatggcctctcgtgaactcacccgggagttccgtttctctgccctccagaaagctgccagaaaaggctctgattaccgccctggtttcttcccggttctccgtcgtaaaattaagcctcaggctctccgggcccagcccgtcaatcctgttcctgtcctttaaaagtgacagcgggcttgtattataaatcgtattatagcagaaacggcaatgattctttaccggaaattccttgcccatcctgtcccgcaggaataacagctccggctttttcttacaggaatccaccgtctttttcatgcactgggccgtcaccatcatggaaggcggccgtaaacaatcaattccccgccccggcatcccatgtcttcaagttctctgctgttaagctctaccggaagcgtcaggcggtgccggaaaccggaaaccatctttgccgtcatcttctcagcggctctgttcatcgtatatattccataatccatgatcagagtcaggtctttcagctgcgaatattccccggcccactcctttaaaagcccaatctcttcccaggcccggattacggctccgtcaaaaccggcgtttgccagaagctctttgttcgcatcaaaataacggaaagcctcttccctgaaaatgtgcggcagcaccaggaaacaccgtttcccagcatgatggcagcggtttgccagctcattccataaaaccgcgtcaaaatgagcgctgtccagataaatgccgtccacgctgccctcctccagaaccgtctcaaactgttcaggctcttcaacggatacgttcaggctgtaaagtccttttccgaggccgtccttatcctctgctccggattcagacatgtccggggcagttttacattccgaagctccggattccctctccgggagcagctcctttatcttccgtctgaaggatgactgtatttcttcctccaaagcggcaaatccccgccttctcagctcattcagctcctggacaggaacaaagggattgccttccatctctacattaagctccctgaaataaaacggagtatttccggtcttcacaatctgcttagcgattttttcctcggttacaggctggttctttgcctgctgtgcctcttcacctgctaccgtaacttcgaccgtctcaggcatctgtccatccctcatgtttctctcgaaacggagtgtcagtgagagcggttccccctcttttacagcaaccgtgccgctgaccggctccttcagttctgcctccacatacgtctcgtcaaggtactgatacagttctctgttttcctggcggaatgacggtttttccttcataaccaccatatcgcgtccgttatgctgccggtagtacccctccgtctgtccgccccggtcaaaaaggtccaacagcctctgccggtcttccttctcgacgcggtagcctttcctccccttttccaggtacagatccacatactttctgtatatgctgaccacccctgccgtatagcgcggactcttcatccggccctcgattttcatcgaatagatacctgcctccaccagttccggcagaatatcgagagtacagagatccttcaggctgagaacataccgttcctctttattatttaacgtttttccatcccttttcacttcaaacggaagacggcaggtctgcgcgcatctgcccctgtttccgcttcttcctccgatcaggctgctgaacaggcactggccggaataacagtagcaaagggctccgtggacaaagctttctatctctgctccggtctgctcatatatctttcggatctcctgcagagacagctctctcgccgtaacgatacgggatgcccccagccccatcatcagtccggctccctgagggccggttatcgtcatctgggtactggcatgcaccggtaaatccggaaacttctcctttatataggaaaacactcccatatcctgaacaatcgccgcatccagcccctgcctgtagtacggttccagatattcataaagtccttccagttctttttccttaaccagtgtattgacagtcagatagagtctgcatccatgcagatgcacataatcaatagcctcaagcagcatatcttcaccgggattatcggcataggccctggcgccaaatcggctcccgccgatataaacggcatccgcaccggctgccaccgctgctttcatactttcaaaagaaccggccggagccagaatttccaccttgtttttcataatatccaactccattttctaaaaaagacgacaggctgatgtattacgaatcctgttaaagaatttcgtttccatcagcctctttcatctgtaaatgtacgcgctgctttccggccttacttcctggcctgctcctctttttccgcttctttaccgcgggaatgttccagagtttccagcgctttatacttttccagctccgctctcatcgcttccagcttcatctgggtgcttaccagttcatgtttcaggcggtatgtctccttctccagttcttccttctgaaccgccagaagtccggcatgctctctctccttgaaataatcatcggcaatattcaagtatgtcataacattctgataatcctccggctgctttctgaagccgtcctgtctatgcagtccggcaatcttgtcattcagatagctggctacctgctgaaggtacgtctcttcctccaggccgccaagcgtatatatttttccggcaattaaaacgtctgtataattcttggaacccatcttttctccatcttctctttcattcgtaatattcatttactttttatcccaggcccagatgatgatacgcggcttccgtagccacccttcccctcggtgtccggttgataaaaccgttcatcagaagatacggctcatagacatcctccagcgttccggaatcctctcccagcgccgcggccaatgtatcgaggcctacagggcctcccgaaaatttctcaatcataatcgtcagaatagcccgatcgttattgtccagtcccagcttatccacatcgagtatatccagggcaaaatcggcaacctcttttgtaatcacaccttcgtacttaacctgggcaaaatcccgcacccgtttcaacagacggttggcaagtctcggcgtccctctggagcgccttgcaatctcatatgcgcccctctcatctatctccaccttcatgactccggcagagcggagaataatcgtctttaattcctccggcatatagaaatccatcttctgaatgataccgaatctgtcccggaggggagccgtaagaaggcccgcccgcgtcgttgctcccaccagggtgaacttcggaagctcaagccggatggaacgcgccgtggaatcctttcccagcatgatgtcaatcgcgtaatcttccatcgccggataaagcacctcttccacctggcggttcagccggtggatttcgtccacaaacaggacatcaccttcctgaagcccgttcagaatcgccgcaatctcccccggtttttcaatcgccggtcctgaagtcaccttcatctttacgcccatctcattcgcaataatgccgcagagtgtcgtcttgccgagacccggagggccgtaaaacaagacatggtcaagagcctctcccctcgatcgtgctgcgtcaataaaaaccttcagcgtagactttatcttctcctggcctatgtattcatctaaatactggggccgcaggctgctttctatgcgcttgtcctcttctgtaatctcagttgttataattctcctgctcatattgcacttcctgctctcccaatcttataaaaatgccagatacttcagtgatgccctgagcactgcctccgcatccatatcctctgttatctgcacattcttcaccgccttcgatgcctccaggtttgaataacccagagccaccagtgccgtggctgcttccctgcccgcctcctgcatgaggggcacggaaattctttcttccgtatctgcgacggaagcaagcatttcttccgcactgactttatctttcaaatccaggataattctctgggccgtcttggcgccgactcccggggcctttgaaattgccttcgcgtcgcccgtcagaattgccaaacgcagatcatccggactcagagccgacaggattcctaacgctcccttaggcccgattccgttcactcctatcagacgcctgaacatgtccaaatcctggcggttcaaaaaaccataaaggctgagatcatcctcccggacctgaaggtatgtatatatcttcacttcttctcccagaggcggcagcacctccagaacggacagcggtacgtagattcccagtcctaccggacctgcttccactacaatcctgtctcccgacttttccgccaaagcacctttaacatatgaaatcacggttttctccttatgcatacttcacttacgcccctgctgcagaggccgtccggcatctctgcgccggtttgctgccggttccgagatgtttttaccagaacctgctatccacaatatcataccataccagtttaagcaatgcaaggtgtgtcgaacaaatattctggtttaaatggagatttaactgaggttgggaggacgcgtccggaacggaccatgtccggtgtggtgagggggatggctgagtcttccgtccccgtgggaagttggttgtggagggggaatccggccggaatgaattgctgcggggaccgtttgcactctttggagtgcgcagcagtgctaagctcgtgagggacctcgccaagcaccggcggactcccatgtccccctccgcaattgattccgcctacttccccgggtcagtttttcaccggggacggaacactcaggcggaggttttcgacaccggacatggtccgttccgggcgctgattgtctccaaccttaaatggggagggccctgtcgcggccactacgtgtttctgcaggcagataccaaatctagcgccttttataaaggcgcaatgaaggcatatcgtatttcccgtacacggtagcactgagtggccgcgacaaggtccgcccccgcacttaacgcgtgagacaatcagcggccgcaggccggcggacggggccgatacacttggcggagtctttcgttccggcgaaaatctggccttggggcggaggggaagataaagtctgcggatgccgttgaaatccatcgctgattagcgaggtcccttacgagcttagcagcgcgatgcatttcacagagcgggagcgtgctccgcagactttatcttcgcccgtagtcccaactcacaacaatcttccccgggacgaaagactcatatacacaccccaccaccccgtccgctggccgtaccggcggcgtcctcacctgcttaactaaatctttacttcctaagcgtttccgaatataatactaaccatagatcccacacgtcacctgccattttaccaaagggagtttatcataatgattacaatcgaaaaaaaagtagatttgccggttacatatccgcttgaaaccatcgggaaattgaatgaactgttgttttttgatatcgagaccaccggtttttccggcgattattccacgctgtacctaatcggatgcacctactaccgggatgggagctggcatctgattcagtggtttgccgataccctgaatgcggaggaggagcttctccacgcattttttgccttcatggaacactaccgctatctgatccattttaacggtgacggctttgatattccatacctgttaaaacgctgccgggcctatgatttggattacgggtttctcaatataaaaagcgttgatatctacaaaattatcaagccgtacaagaaactgctgggactcgaaaacctgaaacagaaaagtatcgagtgttttttgggcgtatgccgtgaggataagtataacggcggccagttgatcgaggtttataaagactatctggcaacccgcgacgaatttctgtacaatctgctgatactgcataatgaagatgatctgaaaggaatgccgtctatcctgcccgtactctattaccatgatttcctaaggggaggatttgcttacaccggccaccagctctgtaatatcagcgatgcgttcggttctgtggaacaagaattgaagctctgttataagagtccggttccccttcctgtgcctgttcaatgggagctgcctccgtttacactggaactgtccgaccggcttctgaccgtttccgtcccgctttatcagggagaattgaaacatttttatcctgattaccagaactatgtatatctggtttacgaagataatgcaatacataaaagtgtcggtcagtatgtagaaaaggatgcaaagaaaaaagccactgcaaagacttgttatacgagagtttccggaatcttccttcctcagccctgtgaaatctgggacggctgtgtgaaatccgactataaggccaaaacctcctatgtcatgttccggccggaattattggaagaagagggggctgccgcccggtatctggacggggtgctgaaacatattttgaattaatccggtgaaataaaatacaaacgggacctgcataactaaacagagacaaggccggaatccatttttgaattccggccctgtcttattgacggcggtgacctgtgcgcggagcgaacaggttatcgttgacggcgcgacctgtgcctcagcagcttcctgatgtaggcaaacgtcttttcctctccctcatccttcagcattaacagcagcttttcaagctgcgctctcgtttttttatgcatcaccgcataatcctggcctctggcataatattcccagggcaggcatccgtatatgcatcacctttataaactttcgaggcggcaatccggtccattaccatttccaccaggtatttgagaggcatttcgttaccaatcagacctgccgatttgtcggggcaaagtcgatccagtattcaaaatggtgcttattccggcctttatgatggagccaggcaacagaatagcccttttcttccttctccgcagcgttgggactccgatctccctgatagtactttaccccaatcctgaattcctcccaggagtatttcgacaagtcatggagaagtccctgtttatatagtcccactttaaaacaattttccattaccatctgtttatgttttgttatggtcctgaaatggcggaccgcattccaaagcttcattctgctctccttacaaacccggcaacgcattgctcccgtccggatcctactgatacttattttacatcagtcatttgcttttatcaaccatgtttcttctgtccgtttctgccgctttagcgccatttttctcctgaatcggccctttttcttcccgcttttcttatacgtccgccagttaaatataaaatgattgcattaaccgttactgttcacacggctgtgttccgcgaggtgttttcgtgcgtattctgcacgaaaatcccgagttacacggcgcgaaactgcgttttgctgtttctgtgcatcgcgaggcttgtaactgttcgcaccacgctgctttttggcggggtgtgaacagttacaattttccctgtaattcccataatttcccgcaaaaatgtttgacagtattctaaaactgtgctattctgagaacaagctgtagatagttacagtaaaacatttttttatttttttggaggtatcatatgaataaaggtacagtaaagtggtttaacaaccagaagggctacggattcatttctgacgagcagggaaacgatgtttttgtacactactcaggcctgaacatggatggtttcaagtctcttgaggaaggcgctcaggtagaatttgaagttgttaacggtgcaaaaggcccacaggcaacaaatgtagtaaagctttaatcatcaactttccagtgtacctctttccataatatgttaaatatatattttgtgaataagttatcattgaaataagtaaagtgattacaattaagagtcatccattcggatggctctttttgttgaagacggtgacctgtgcgcggactgcgccggatattattgtcacgctgatatatttcaaatgttttttcccgtgtaacagttcagacagcatgaactgttacacgggcgtttctcatcttacggccttttctaacaatcccttcagttcgtctaccgtaaacgcataattcttattacagaaatggcagttcacctctattgtcttcccatcgtcaatcatatcctgtatttccttcttcccgatgctgatgagcgccttctccaccctctccttgccgcagttgcagtaaaaccgggccggcatttcctccaggatttccaggccgaattcaccgatgatggagtccagaatcatttcaggggtcattgcggaatccaggagggaggttaccggctccatctcccccagctttttctccagcttgtctatgatttcatccgacgccccgggagaagctggataatgaagcctcccgcctgacgcaccgtattgtctttattcattaggacgccaagggcaactgaggaaggagtctgctccgaggttgcatagtaataggtaaggtcctcagcgatttcacctgaaacaagaatcgtctgtcccacataaggctctttcatcccgatatccttaatcacgcttaaaactccgactcccaatgcgcctcccacatccagctttcctttggcgttcggcggtagcatgacggacggattaaacgcatagccttttacgtttcccgcgctgtcggctgtgacggtaagcccttcaatcggaccgtccccttctatcctcagagtcagaagatccttctcgcccttcatcatcactcccatcatggcccctgccgtcagaagccgtcccaacgcggccgtcgctaccgggcttgtattatgggcgcttcttgcctgttccacgagcccccttgtcgtcgcagcaaatgcgcggatctgtccgtcggccgcagtagctctgattatataatctctgtctttaatcatgttctgctttttcctttctgtctatctgtaggttattcgattcctttatttaccatgctctcttacaatgatataaatacgttcactcgtctcaccgggagcttctctcgtaaacgcgtcgtaggcggcgacaaattccattcctgcctctttggccgcggccgccgcttcatccagtgtataagccctttggaaatgggtttcacggtactttctgtataagtccccgtcttcttttataaacagggtcagatcgtactcattaatgcgctctgtctcatcgtaatcgttatcccagataaaactgctctcctccctgtcctccgctatcgtggactgggccaggatttccctgtatttgtactccgtattcagatcaaatataaaaatgccgccgggatccagatagttatttacaagggagaaaacctgtaccagttccccgtaatccagtatatagttcatcgaatcacagatactcacgactgcccggacagtcccgtacagctcaaactcccgcatatcctgcagaagatacagaatcggaagtcccgactcttccctcttctccattgcgatctgaagcatatcctctgaaaaatccactccgatcatatcgtaacccttctgtgccagaagttctgtaagacttccggtgccgcagccgagatccaggagaatgccgtcctccaccccatattctttaaggagcgatgtgagataggcacaccactcgccatagggaatattatccataaacatatcgtaaactgatgcgaagctggtatatgcatccatattaatcatcaccttttcataccataatttaaaccgtaacattcaatatatcaatttttttctacaaaagcaacctgttcttgattatttcacctgctttgcgttatacttatgtaacaccgttccaattttccctttgaaagtgattaaacagatgaaaaacagttttattgttaaaaatatacggaaggcgctgctccggcagttagtttttccaatccttctctttattgcagcaatggccgcgctgataaagattcccagaacaaattttctttttccgcggcctctaaattccaaaagccattatgaaaatttttataaccgcgatctcccctacgtcagcgtcacggcatcggatttacattatacaggatgtaattacgttgtcaacggacggaccgagggctattactattataccctcgacggcggattttgtcagttctatcttctggatggcagtgatctctcagattcccgggatggaaccgtttcttcccttaccctgaaaggccggctgatagagatgaaggagagcgaatatacctcccttctcatcgagatggcggacgagcttaactggaccgtatcctcactgaaagaaataacagccccctatgccatctccacactgccttatcctgtatacctgaccgtcttattccacctgctgggctacggctgcattttcctgtcactgtcggatatcatctgctcgctgtattatatctgggagcctcaccgttctccgacgttccgttatctgggcacctttggggaggtacgcaccctgcttcccaaagtggaaattgagatgaaacacgtcagtattgcgaaagcgggaaatatctatctcactcccagctacatcgtgaatgtggacactgtcagaagcctgattctgcctcttgaatcagtcgtctgggtttattatcacagcaggatgctcccgctgcccggttttgcccgcttccacttccggatcagctatacgctccatatcgtggccgacgacggcaggacttacgattttaccggcaaaaataaagaagatctggattatatcatttcttcgctggaaaagcgggataccggtatactgctcggatactcggacgtgaaccggcggctcgccaaggaaatattaaaaaagaacaatcgctgagatcatgagacttcagcgattgttttgtataatgaaatatgcgactatctgataacgccagcggtaatgattccctcgccagctttgcggtggcctgcgcagagtctgctgaatatgatttaatcctcctggctccccgccagaagaaacagctcattgaccgccacagccaaaggaccgatatattcaattctgtcgctaagctctgacttcacaatatatccgccgtgataagatgcatcataatgactgcaaaaatgcaggaaacgctcttccacccgcgaatggctgaacatctcgccatagataatgaccttgtcgggagccagcagggttatggtattcaccgccacccttgccaactgttcaatgatatcgtccagcaccctgccgagtccttcatcctccgtctcaatccattccgatatgttcctggcctcaatcctgtttggatcgccttccatcagccggcagagctgcggcatcgtctcctccgtacatgcggcccggacctgttcggcaatcgcgtgggtcgccacctttgtctccagacatcctttacggccgcagcggcattgtttcccgtctttttccacgatgtaatggcctatctccgccgttttggaattctgactgtcatagagcctcccctgaataatgatggccgaaccgactccgggcccccatttgatgaacagcagattttcccattccttgccgtttccatagattaattcgccttccgcaaaggcttttacattattctccacaatgacgggcaaatccatctgctttccaatcaagtcgcctaccgcaaccgctttgttccaaatccggtacgcatgctggctgatacctgtcctgcggcttaccggccccggaactgatacgccgattcccagaaccatatcctttgtaatgccttgctcccacatcagagcctttccctcatccgccaccgtcttcaaaaatttctccggatcctgcccccatcggtcggcatccattttgctcccagacacaagcccttcaggttactgattgcaatacaggtttttgccgcttcgatactgacggacagcacatagcggtactgatagttaatatcaatcagaactttccttctgccggccctccgctcctcttccacttcgcctttttcacagagaatcccggtcgaaataagctccgtgcagatcaatgtcacggttgccggagtcagccccagttcaatggcgatatccttcctggacatagcgccgcaatcattgaggagctttagtatggagcttcggttgctcattttcacatttcctaaattgattcctgtatatcccaaagtctcatcctgtccttcttcaataataaaacatcagcgttcatgccttcgatgcgcagacctgtctgtactgtcacaaaaactgttaccgttaacagtaaccaaaactctcttttatcagtataggtgcaattgttttttttcgcaagtaccgttttcctctgtttagccggtttccggcataaccgtgtgaacaataaccgtaatcggactggagtctgtcttaaaattgctttctgtcagctgtgcgtcacactttgtgggagatttggcccgaatgagggaggcgtagtgggctacgctgactgaattcgggccaaatctcccgcgaagtggggcgtgcagctggcaggaatgaattttaagacaggctctaataccggcagatttctgcgcccgtcatatttgccagcttttcaagctccggcgccacatcgccgtaaatcacaacaaaatgaggctcccagcccgccttcacgctgctgtggacaacttcttttgcgtccatctctgtctttacgacaattgaagtaccgttaaactgctttggtttgtcaagcgcttctccccttgcaataaagaagcggaacgttccgtccggttttcttcccacacggaatacggtcacatgttcacaggctgcacagccaaagtccatggtcgggccaattttgcggtttggatgcacgcctacctgcgctcccgtatccttccgggccagggagcatgccgccatgccgcagtgccagtatgtaatggtgccctccctctcatccatcgagacgggatctccgaaaaatacggcctttcccgtcaggctgctgccgatatacatagacagagcgccgtagacgtctgattcacagctcgacggaatgcctgatgcattgagtaaagacagtacggagcagaccggtgtgccgaaagaggtaaagaagtcgggccagcaccgggaagaaagcgcgccaataccgttctcccccacataatccctgtatgctttatacagacgggcaaagtccttcacattcttatcaggtgtattctctattccggccatccatttcttcgcctcttccaaatcagcttcgcactcttcgtcggtaaagcctttggccttttcgattaattcccttgcctcgacagcctccagagtcacgccgaaatttttaagcagctcggcgtccagggcgcgtccgaagccaaagccctgcggggtgtggccaatcgccgccattttcagtgtcttcagccgggcctttaccctggcggcacggacagcggcgccaatcccggccgccgcttcttcctcctgcggggaaccaaaaacatattcaaattcaccgtcccggaacgtccggatggcattcgccgcagaataagcgccggtgagggaattcaggcgcagcctgcccccgtctatgacaggctcccttaaggtccagagaaccaccggacaggtaaaccgcttcagcacttcgcaggcataagccgcattggcaaatgtaatattttggagtacaatcaaatccggatggattccatccagaaactcattcagatcatcgagagtcagaagcatcttatccggatacactccgtcctctgtcagggattttaataattgtatcgacttttcaaattcattctgggcgctttccagatggaaagtgcctacaccgatgggaatatatgctacttgaaagctcataattttgtctcctttattcgtgaaacggcctttgtatccgtttcagcgcttcattttccgcaatctggccagagggccgtccgtaatgctcaggcttcagcccggctctcctcctggcctttcttcattgcttccatctgttcctggttaagcgcctccaccttcttattaatccggatcatagagataacaagaactaccgtcagaatcaggatgcagcaggatatcggacgcttgaagaagatcagataatccttatcgtaactcatcatgcttgttacaaagttcatctccataatatcggccagaatcattcccagcatcagtggtgtggaggatatatcgagcagggtcaacagatagctgaataccagaatcgccgccgtcagaaccagttctttcgtattgcccgtagccgcgaacgcaccggcaaagcagaagatgataataatcggcgccagataggtatacctgacctggataatcttcgcaacggcccgtgtaagggccaggccgatcgggtacaggaatatattggcgataagacagcccaggattatagaatacgcaatcacgccctgttttgtaaacatgttgggaccgggctggataccatgcaggataaatgctcccagaagcagagccgtaacgccgtccccggaatacccagggttaaaagaggaatcatggccgaacctaccactgcattgttgctggcctctgccgccgcaattccctccaggctgccttttccaaagtcctgcggacgcttggaagctctccggcattcattgtagcacatgaactgggcaactccgccgcctacgccaggcatggctcccaatatggatgcaatggcagaggaacgggtgcaggccggaataatcgatttggcttccctgagcgtcagcccctctgtgtcaattttcgtaacatcgtccagctttcctgccgccagcacgaaatcccggagcttctggaccacctgggttaacgcgatcagggcaatcatggcaggcagcatatcaattccgtagcgcagagaatcaatgccaaacgtaaaacgcatgacaccggtaactgcatccgccccgatggctgccatcaggatgccgagaaggcctgacataattcccttcgggaggctgtcgccgcttactcccgctatcagggagattcccagaatcgccatggaaaagtattctaccgaagcaaatttggaaacaagttttgtaataaaggaagcacagaccagaagaagcagggcggaaaaaagaccgccgaaggtcgatgcaaacagggaagtatccagggcttttttcaccttcccctttttcgccagcgggtatccgtcaaaggtggtggcaatagccgagttcgtaccaggcgtgttcagtgtgatggcgctgatagagccgccgtacatacctccgacatagacagccagaagagagattatggctgtgtcgggcgatgaaaacgaatacgtcagcggcagaagcaggatgatacccagagtgacggaaaggccggggatgcatcccacaatcatccccaatatcagtccgccgaagataatagccagatttcccagagtaaacacattttgcagagcaagcacaatctgttgtaaatctcccataaactcagccccccagtcccggaatacccggcagcgatacgtggaacacgtacttgaacaggaaaaagatccccactcccgcggccactgtaaacagatagataaaaggtttgcgctccccgcagtaaaacagaataatcgggaaaataataactacagccggaataaatccgatattgatagtcagcgctacataggcacagagaagcaggataaaaacgatacaaggcttctccttcttccagtcaaattcaaaaattttctcttttttaaatacaaggctctggattatcagcgccgcggaacaaaccagcgtacccgccaggcaggtaccaggaatgattctcggactgggcgcgccggagtcgaacatgggaaggcggacctgcccgggcattgcaatcagcatggcaatactgaaaaggcccattatgattccggaccagagatttgtttttatcttaaacttcattcccaaacacttcctttctctgaaattatctgccatttaccggccatcgcggttcccccgcacgctccgcggaggctttcgcccgcgggattctttctcactgcctgtttaccggaattactgctgtccgctcaaagtctcaaatgcggtgagcgccttttcgcaggcttcttccaggaaggcattggcatcttcgccgtaaacctcataccgattcagcatgatttcgccaatccagtcgctgtattccggatctgcccagacatccttggaaatttggataatttcatcaatccatgcctgatccgcgccggtccgtactgcgatgaatccgccggccggaagaatcgagccactgtagtctttgccggcatccagagccggatcctttgcctcgcctgctacggatggaaccgtaatcggaccgtccggacctgtaaaaccttcaaatgccttgtcggagaatgccagtaccggtatcatcgtgcctgcttccacatcttcctggcccgcctgagtcgtacctacaaatacatcaacctctccgtccgtcaggccttttttctgggctgccccgccgtcgtaaggaactaccatggtcttgccgccctcctgggcaatcagggaaccgagcgccagatgcgggtcggacagcggatttcctcccgacattttaagaccgactgttttggctttctcaaggagatccgccagctttgcatctggttttgcatacattatccaggttctgtcatccacatccgccaccggataaatatcttttctgtcaaaatccacaacctccgtctggtatttcacgccgagatcatgcctgtaagccactccaaagccgtataccagaagatcttttgtggaaggagcctgatctgtataccagttggctgcggagaatccgtctccgccggtcatattttcaacgataaaattatattccggatggacctttcccgccacaagcgcatactttcttgcaattgcgtctgccgttccgcctacgccgtaaggacagataatcttaaccgtctgtccgctgccgcctgacggctgctgcccctcttctgccggagcctttgcctcaccggatgccgcagccggctctgccttctgtgtctgtccgccgcagcctgccagggatgccgccattgccgctgccatcactaatgccataattcttttcttcataaaataaaccctcctgataaatttaatcttgttgactgaactgtaacgaactgtcactgttatatacagctataattacagcccgatattttctctgagccataaatgcttacttaactaacagagagattcccgatataaacaataatacgtatgttataatcataaacagcctctggctcatcctggcgtacagctttcctccaataaacataccggcgagcagaaacggaactgaaataacctgtattctgcaaagctccggggtccataatccggcccggatgtcatccgccagaatcatgccgtttaaaaaaatccagaccgtggatattgtcgcccgaaagcttaccttatcctgtattttttttgtcagatagctgatcagaagcgggccgcccgatacgaaaatcccgtgtacgataccggccagaatcagtatcagatagagggccggcgattcctgccgggacggagtctgaatcgcttctttccggctgttttgcccctctttccgaatggaaagtccaccgcgcactgccaggaaaataacaaatatgcccagaaaccggtatagcgcctgttcttttccgataaacagccctctgagcagaatacccccgatgattccggccgccatgactgccacaatttttctcagttccgtccagcacacactcttgtaattcccggtaaagacataaattccggacagaagccccaaaacgttcagaaccggtttcgccaccggataccccaccagcatcaggccgggcggcattgcaagaatcgttcctgcaaagcctgtaatcccctgaataatattggtcagaagtataaccaaaaggaacagtatgtaattcatcattgtcatttacttcccgtgttttctgcggatgtccgcaaataaaggagcatactgcgaatccttcttatagaagacaggtgtgtcacctaatccggccggcaccgtatgggagcctttttcgtattcctcaccggtccacagatgtatccaagagccctccggaagatatacctcccactgtatctgtcctgccagatagacgggagctaccagcatatccggtcccagcatgtattcataccggatatcgtaactcttctcatcattttcataatgtaagaacagcgggcgctgtacgggaatacctctctctgcgttttcggcaacgagttttttcatgtacggggccagcatcgtatagacatcaaccatccgtgcaagtctctccatacaatccgtatcgtcataatactggaaattttcatccggccggttcccctcatgggtacgcatcaccggcgtaaaggccgccatctccgcccaccgcaggaacagttctttcgttctggtattgccgaacagagaagtatatcctccgatatcgctgtgactcagcccgcagccgctcatccctgcgcttaaggcagcacagatgactgtcgccagcccgtcatggatgctgaaatccaccgactgatctcccgcccagagtagcgtgcagtatttctggcttcctgctcctccggcccgcatgaaatacagtacatctcccagcctgcccgtctccttcagcgcgtcataattgcatttcgcccagagaacgggccagcggttgtgttctttcatcggagattccccgttatacagtaccaggtcatcggttggcagatattcgccgaagtcggccatccagccgtcaattccgatatccaggctgtgttttttcaccacctcgtccttgaaccattcataggcggcaggatttgtgaagtccacgaccccacagtaaaattctccaaaatccaccagataatcactgccgtctgcctttgtagcaaatacgcctttttctttcccccggcggtacaactcgccgtcattgacaagataaggattaatatagcctaaaaatttaattcccctctcatggagcttttctatgcgctttggcagttccggatacatttcccggtggtactgccagtcccactgaaggcgctttccgaaggaggtcacgcgcttcccgcaccagtcctggcaccagagtccggataccttgattccatgggagattgtcttctccagcaggctgaaggaacgctcgtcacctccctgaacccctatgattaaaccgttgtaaacccactccggaagctccggctggcggccgaagaatgcactttccttttctaaaagtccgataaaatcaggtgccgcctcaattctgaccgacgccggcacttcccatacctgcaattcatgaaaatccgggtttcggaaatcaaaatcggcataggcggtggaatttacatgtaagtaataatgctttgtggatacaaaggtcggctgcgggtaattcgtattgtaatagtctccgcccgctttgttctccacatcagatctccatgtcacataagttgtcttatccctccccactcccggctcggaagtccatagcggaaaatgcctcccccgcagattaaaataagacatctgttccccgcagccgtaacatttttcgttgtcgtctgcgtttacccgaagccagaaacggttgatatccggatttttcggttcaaagaaaagttcggcgcagtctcctgaaagttttaaagtcagaataatctcatcttccagattgagaatcagcccttcctgcgtctccctggcatccgttacagaaagcgggcgccgcgtggttacataatcctctatcttataattgccgcggtacatatccacatcttcttttccccggccggcgtaaatcatcggccggtctttactgtattccaggattgtttccccgccgtatttcaatatgaattcattaccattacgaatcagtttcatagtaatctcctgtcatcactgcccttcgtttccctctgtcaataatgcaattccttgttctcaccgattaacccggcatgagctccctgccggatcagaggttcccgcccgggatgggcaattacccatttattcttctgaagcagcagcactccctctgcctccaccgcctcatccctgtgttccagaggcgtattcgtccctttgggaagaatgacaatatccctgaatccttcgtcagtcacacggcagggggataaatgcagcgtggtctggtacatctcaaccgccgttcccttttccacgaaaaacaccttagcgtcctccacccggtagctgttatccttaatttcccataaatgccccagtaccagcataaaatcggttacggcaatattaatttcgctccctttgtggtattcaaacccattatatgtattgtttcgtccgttgcagtagccagcctgtatctccatctcgccgtaaaaaccattttgtatggaccgtatcaccggatctgcctccatttccggcacagacgcataataaatatttccgttctccggaatttgtgtcttctcctccatataggaaatcagcccagagaaatcataaccggttaccacgcgcccgtatgaggcaaactccgggtctgtcacagagagaaccggtatgtcattcacctggttcagccgttccagtatcgtcattcttatccgcctttctattttcctgctgtttatatcagccttttaccaccttaatcgttgcgcagaaatcttcttttccgtatcccagttccagagccttgtcatatacgttacaggcattctgctcaccgggcatatcaagtccgcactctttagccagttccatgcaaatatgtacatcctttgccatgttttccacggaaaacgcagtggtgtaatcttctttttcaatcggcgcagccttgccgtccagataaaagttctggcctccgccataggaaatcgcttctgcatatgcgcttacgctgatcccgtttctctgggccagggtgattgtctcattgacgccgttctgaatctgggaaaccagggcattgtggcagattttcatgacaagtcccttgccgttatcccccatgcgcacaacattctctcccatgtaaagtaaaaccctgcgcattttctcaaaagtctgctcgtcgcctcccacatagatacccagctttccggcaatagcggccggttttgattttacaaccggagcgtcgatgaagccggctcccgtctttttcaccatttcagctatctctatggatgcgctcggatcaatggtactcatatctatacaggtctttgtctcatccagcgcatccagaatttctgaatacactgcccgggaatgctccgacttcggaaccatggagataatcacgtccgatttctcagcaagctctacggaggtttcacatgccacagctccctttgaaaccagaagctccaccttctcttttacaaaatcaaatacatatacggtatcatcatgtttctttacaatattttcactcatggactctcccataataccgagtccgataaatcctattttcatgttatctcctttctgcatccgttgcgggactgccgtaacatttcagacagcataaactgttacggattgtccagcttcttaccccctgctttttatgccccgggtttattccgtgattgtgttatcccaggcattgataaaggttccaaggccctgcgtcgtgtaagcatgtttcatcgtatccttgtaaacgtcaagcccggtggtaacaatatcggctcccgccacagcacagtcaacaatctgtttcggtgtgcggacagcggcacagataatctccgtctttttatagaaaccgtagtttttatatatctctacaatgttctttatgtattccctgcagtcttctccattggcctctttccatccgatgaacggggatacgaagagggaaccgtttttcgccggaagtatggcctgtgccggtgagaaaacaagcgtcacgttcgtacggattcccatcttctccagtcttctagctgccgtgattcctgattcaacggccggaatcttgataacaaagttggggctgatcgcagatacctcctttgccatctccaccatctcatctgcatcatccagatgtgggttgatttcaactgagacagggaatttatcgattccttccagacccactgatttaatccactctgcaatgtcggttatcgccttcataaacggttttccgctgagcattatatgtcttgggttcgtggtcactccatcaattccaaatgtgttataagcatactgaatttcatcaagtttcgcgctgtctaaaaaatacttcatttttaatcctctctttcatctggccactttgattaatttaattaattatttaatatatcgaggagggattacggattattttaataagctttatcctatattcctctgttatgaaaatataatatgtctattttgcacaattgtcaacatgtttatttcatgttttttgtttttagttactttgtttaatttatttaattaattttatgcaatcttacgatttcatctttcttccaaatttattataatgttttgatatgagagtctccggttcttcaaaaatccggtttccgcccggaacagggcagaagatgatatatcggtgagcaaagcgcattggacaggttaccgtcttaataaaacagggagccgtaaacacctcgcggtatcttcagctccctgtcatattattcggtttcgtccggctctttcaatgcatcagccggtttatgtgaaatctgattatttattgcgtccgcagcacttcttatacttcttgccgctcccacatggacatggatcgtttggataaatcttctgctcattgcggaccgttccggaagctttctgtgctttgtaaagctcttttctcttctcctgcgtcagaattgaatcccactgaggaagttcaaaaagccattctgccttagcctcaaccatattataatataatttctccggatcgatttcaatcttgacagtcgtatcctcatccatcgtctcaatcgggttctcgtatcccttgaggctctcgttgatgccatccaggaatcctgtcatgattaataattctgtttcatatttctcggccagttcttttaccgtaccttctatcacttctgcaggattggaaagaattttttcatagatccccttctcaatagcaaaatatccggaccagagttcttccttctgtttatcattcatcccatcgccatatgcaagattacgccagttttctaacaatgtcatatgtaacaaccttccttttccgtaattattaacgcgattgcgtcagtccgactctagtatataacatgttggcggtttttgcaaaatattttttcttacatttcctgccattcaggcagaaatgcccgctgtaaaacgataatctgcacgttccgcacacaggtcaccgccatcaataaaaaatccggcccgcctacactgctgtaaacgagccggattaaaaaggggaggataagtattcaaaaatttctcttttgtgatacttacagtataacctccctgaattgaattatacacggaagcaaaaatatttttatttatttttcgccggcgttatccggaccaccactaattcgggccggttattgattcggattgggataatgctgtttcccaggcctctgctgacgatcatctccgtttcaccctcagcaaatattccggatgtatatttcggaaataatccctgtccgggcgccaccactcctccgataaagggaagccgaaactgccctccgtgggcatgtcctgccagaaccagatcaattccattgtccacatagacctgaaacagttccggccggtgggacaggagaagtttatatatgcctccgtcacaggatatgtccccgatagcttcgttcattaccgattgggcgtccccgtattccgtccttgcgtaaaatgccggatccttcgctcccatcaggcagatttgctgtcctcccatagaaaacgtttcagatattccatccaggatatgaactcccgcgttctccatctcacgtttcaacctgatatagctttccgctgcccacgcttcgtggttgcctgtgacaaaataaacaggagcgattgttacggcctgcgatattaattccatcgccttcccgatatccgtatgatttgaatcaattaaatccccggttacggcgatgatatccggtttggcttcttttattttccgaatcagcttttcctgcttatccccaaactcagcgttatgtaaatcggaaatttgaattatcgtgatatccggcgcatcaggcttaagtttactgctctctattacatagaccgttgtccggactgctttgttttgccagaagcaccatcctgtaagcagcgcagcaccaaacagagcagctatgaggatttgtctgtgttttaatattcgtcttttctccataatacctcgataaacaaatggctataaaaactaatgcagtaaaatattattttccattacaaaaatttttccgaaatcagcaccaaagctctgctgtttagcaaccagatacgttacaagctgtcccctgtctttaaatatagtagcttgataagggtacaaggggctgattttttccaaaaacaatatatcttcaccatcctcaaccaatacaccagcatgaacggagaagatataagaggaatctttcccttgcacattccccaaacggtaatcagagacggcctgttattttcaaatgataattccagagttttccaatagctgttaaccgcggctgctctttgttcggcgtttcgacaatctgtccttgttttaacaggttgaaaaacgctataatacttattctttgtatcttctgtccacattatggcgggatttctctctataacctctctgtcccccctcattagctccttatcacagaccatcattgttgatgattgggaatctgttagtgataaaaaatcctctactagatagaatgctaccgttctgcacagtaaatcatcataattcccgcgtttttctgcccaccgttgagccatagaaaaacgcggtacataaaataccatctctccatccatattcgtaaaaccggtttgcagattatatccttctaactggttgaactcctcagcccacagaagaaagttgcatattttttcctccggcatttgagcttctcttaatttttcagccacctcttcacgtgaaccttcatccgttaaatttgaatagactggaagatttgctgtgactgagcctttggccttgtcaactgctggtttatctctttcttcctctgcacacgatatcagaaatatcataagaaaactcagtattaatatatttctcatactttctctccatgattttccctaagtattgacaggtaaccatttaattctgtttgaaggttccataatctacggcaggaaatttcccgttcttcccgtctttgattttcacctttgcagttccggtaataatctccttcctgctcgtatcatatttggtacatgtaacctcatttcctttatcgttatccgtaattttcctgtcggtaaggtaaagttcataaccattgccgtttttcctcatcacccagcttttggccgaaacattaaccccctgttttttcagttcaatctcaacaatcttcgctaaagaaccatattttccataaccctcatccgtaatcttggtactcgcctcggaatccagggttttcgatgtgtcatttccaaaataatcggccagcgtcttgtaggttttcccgccgctgacaatattatagctttccagattcatctcattcagcagatggctcagcgtgacaatatccattgtccagcccccatgcttgctgcactcaatcgtaattgcattcaaatcatttacaaaacggcatttgtagtttccgtgacttttacatacaccggagaaccggaaaaagatggaggtgtcttcctggctttcactccaattcttatcgcctccgtgttccacaatgatttcactcagtaaattaaccgcggtctcctcatccggggccttccccagatcggcgactttggccatgtattcctctgcaataacatccatcgcgtgcagacatgacgctttccttgctttctccatatacttcataaactgtggagccagcagccccgtcagtatcaataatatcgcaattgcaataatcagctctatcaggctgaaaccgaggttcttctttttcatacgatacaccttttcccattaaagtcttccggctgctgcccggaacttgccgctttgccgaccgtacagctcttgattcattatcattttaccacccgccctgtttaattacaattcatatttccttgaaaggtttagttaagcaggtgaggacgccgccggtacggccactcagcgcttctgtgtgtaggaaatacgatatgccttccatgcgcctttttaaagaattgcagaaaaattgatatcagcctgccagaaacacgtagtggccgcgacagggccctcctcatttaaggttagagacaatcagcgtccggaacggaccatgtccggtgtcgcgaaaaccttcgcctgagtcttccgtccctgcgataacctgacccgggggaagtaggcggaatcaattgcggaggggacatgggagtccgccggtgcttagcgaggttcctcacgagcttagcaccgatgcgcactccaaagagtgcaaacggtccccgcagcaattcattccggccggattcccccctccacaaccaacttccacggggacggaagactcagccagccctcaccacaccggacatggtccgttccggacgcgtcccccctaaacctcagttaaatctccataatccggttgaaatgttcctcttactattatagaataaagatatcatacccctgagaaaaaggagacagtacattatgaaaaagaatataatcgttggccagtcaggcggtcccaccgccgttatcaatgccagcctctgcggtgtaatcagagaagggaaatgccaccctgagcaaatcggcactgtttacggcatgattaatgggatcgaaggatttctggccggtaaatatatggatctctcatccgggctgaacgaggaggaactggagcttcttaaaatgactccggctgcttttctcggctcctgccgctttaagcttcccgaagctctttcctccgagttctaccctaccctctttaacaaatttgaagagctgaatatcggctatttcttctacataggcggcaatgattccatggatacggtaagtaaattatcgcgttacgcgaatggaatcggaagcgatatccgttttatcggaattcccaagaccatagacaatgatctggtcgggaccgatcacaccccaggctttggaagcgcagccaaatatgtggcttccactgtccgcgaaatcacgctggacgcctcggtataccagcagaaatccgtcacaatcgtggaactgatgggacgtcatgcgggatggctcaccgcctccagtgtcctggcaagaaaacacggggaagataatccgcttctcatctatcttccggaatcgccttttgaatttgaacagttctctgctgatctcaaaaatgcattcgagaaaagccagaccgttgtcgtctgcgtatcggagggcattgcagattcagccgggcatttcatatgtgaatactccaatgaggcccagcttgacaccttcggccacaagatgctgaccggctgcggggaaatactcgaaaattatatacggaaccagtttggtgtcaaggtacgttccgttgagctgaatgtaagccagcgctgttccggtatgatcgtctccgggcaggatatgaaagaggccgaagaagcgggagccttcggcgtccgaagtgccctggacggcgtgaacggtatgatggtcgcctttaaacgcgcctgtgaagagccatacttgatggagtgcttcctggccgatgtcaatgagatttgtaataaagaaaaaacgtttccggccgagtggattactaagggcggcaccgatatcggccctgagttcctctcctatgttttaccgctgataaaaggggaggccgagcggaaaatggaaaacggacttccgctttatctttaccgggaacaacaataatggcctgcatttacagcagccggtttaaataagggggtacctgccatggttacaattaccaaagaacacgttcatttcactttttccggaagccacaagccggtgcaaaccgttccctccggaagtacggtccgttttgaaacgtatgactgtttttacaaccagcttcttcccgaaggagccgatatcacaaagatcgattcctccaaagccaatgcggcgaccggccctctctgcgtagaggaagctctcccgggtgatactctgaaaattgagattctcgatatcacaaccggtcctgtcggcgtctgcggcacgtttcccggcagcagctgggacaatgggatcctgaaagaagaacagttccgtcggctcaccgtcaaggacggaatggctgagtttgacagtgcggtgcagatcccggtcagacccatgatcggagtgatcggaaccgctccgaaagaaggtgcggtttccacaatgaccccgatggatcatggcgggaatatggactgtacccagattaaggcgggaaccaccctgtatcttcctgtttatgtaccaggcgctcttctgtccatgggagatctccacgccgtcatgggcgacggagaggtctgtggctgcggactggaaattgagggaatggtaacggtgcgcgttaccgtcctgaaagatgctccattcccatggcccgctgccatagcggacgatcgtcttatcattattgcggctgcaaaaaccgtggagtctgcctggaaacttgccaccgcgcggatggaggcattcatttcttccaaaacaggcttatcccatgaggacacatccatcctattaagtctctgcggcgatcttgccgtatgccagaccgttaacccgatgaaaacagtgcgcatggaactgcctctgaatatctttaagaatgaatcgggcagatggaagcagccataaaacggccgggcaaagagggaggggatgccgctcaatcatcgttttgatgattttgcggcatcccctccctctttgcccggccgttttagcagctatactgcctgattgtgcctggccgtcactccgtcagttccctcacatccacatcgctgtaaaagaagttgagaatctctttatacgtcttgccttccttagccatctgctgggctccgttctggctcattccgactccgtggccataacctccgccccatatggtaaaggtacgcgttcctttttcctcgtccctggccgtctcatccacagctataaaggcgcttggcagggaagcccagtccgtcatcgtggatccgtcatttttcttatagaccagatcggaggcacccagcatatttcggatctgggtctgtcccttcaggactttttccccttcgcttccaatgaccttcaccgtcttggcaatgcctcctgttccccgttccgttacaaaaagcgcctgaatcgtaccgatatcatctatcttctcggcaagcttcttatttgtaattgtcgtggaccagcggtacatggaataaccggagtcgtaattcttcatcccctgcccctggataaacgggacaaatacttcattctttgtcatgtcctccattttcttgtcttccgtcagggcaattccctgcagataaggaacatccttaaggtccgctccccagatcgtgccgtcggtggtatagccgcaggaggttgaaaaataatacgtttccgcaggtgtatcgccatagaaaaccatctctccgtctgtctctttaattgcaagatttgttctctcatttgaatcgatattgttatacacctgataatttgtactgtcatcgacatgggctccgtactgactgtaggcattagcctgaatctgccggtaggcataggttctggcgcagactgcctgggcttttaaagcctccacttcgtaggaggacggcatctcacttgggactaccctggtcagataatcttctatatccacctcattgacgagcaggagcccttccgactccttgctaatctcaaagcagccgaaatactccggagtaccctgctgtctgctgacgctggccactttaatacccttttgccgatcctcgggctccaccgtaagccttccctttaacagacgctcatcgtcctttttgataaccagctccgaaccggcttcaatcacttccgatgaatctccatactcaagatgcagaggcgtgtcggctttcaatataattttatcatggaaaatagaagaaaacccggtgtccataaccaacaccctgatatttttggcagaaaaacttttaaccagaagggcagcacatatctttttatccgccactacaaatttttccaggttgtagcctaccaggatatcttttttcttctgctctttcacgactccgtatgtcttataaaccttgaagtctttgtccagccgcacctctccgtatccctcgatctcaatggaatcgtcccggactgcaagaacctttccctcgatcgtatcttttttcagggacagctttttaatctttcccttgctcagggagacatccgccagcactccgccctcttcctcctccacctcttttgcagatggaaattcccggataatcgtacctatgtagagattcatttttttatgttctccgggcgccagccatacattcctgtaaaccacctcgtcggagaccacagcggacaggtgtatcatctcgccgttcctgatcagtaccttgatctcgtggtcaatataggaatccatggaaagaccctcaaatcccattatcccttcgctggtatacgcagtccagggagcggcttccttcacattgtccggcgtaccgtaaagcagaagctttacctcctgtaccgcctgctgtgtgtccgcggcctttaaaaaggatgggtaaaagagccaccattcttctttgggcatcggtttattatatttcttttttgagatattaagcgcctgagaaaggcccttggaaacttgttcggcagcaaatgccgcctccccgtaagtcaggggggaggatgcatagtcctcatccacaaccgtctcctcctcaatcagcccctgttcaaacagatagtcgatatatttggccgaccattcctctttcagctttgcaggaagacgggagccattctcattctgggatgcctggcactcctccttgtctgtcagcgcgagcgccatggctttcgaggccatggcgcgggaaatataattatctgccgtatcaagcttgacaataatgataatcagaactaccacaattgccggtatcagaaaggtccagtaaaccattttcttcgatctcataaaaatcctttccctatcagacagcttcgtccggatgtccgttttaaccgtaatgactatttaatgaatctgccgtctttttcgtcaatatgatccaaatccttataatcctctgtcgccatagacagtttcttattcttaagagagaaatgcactgccctggcaatcaggtcgtaaatgactgcaaaagcaggaactgcgataatcattccgacaaagccgaacaggcctccgaagagcagaatggaaaacagcacccagaaactagaaagccccgtggagtctcccagtatcttcggtccgaggatattgccgtcaaactgctggagcagcaggataaaaataagaaaatagatacatttaaccgggctgacgagaagtaccaggaagccggtcgggatcgccccgataaacggcccgaaaaacggtatgatattcgtaacgccgattataacactgattaacagggtaaaaggcatcttcatcagcgaggttccgataaaacagatgattccgataatcagggaatccaccagtttaccaataataaagccgccgaacatctgattgacaaaacgcagttcttcaatcacattgttggcccatttgaggttcatgcagctgtatataatcttctttccctgagcagacagagtgtccttgatattcagaagataaaccatgactatcagtccaatcagccagtttttaataaacactaaaagactcagcacactgcttgagacgccggtcagaaattctcccagcctggtcatatcgatattggtaaatgatttctccagccagctttctgccatcgtaacactgttctgaaggttgcttagcaccattgcctctatatccgggttgtcagccagcacctgctgtatccatgcataaaggttctgcagatacgtcgggaaagaatccctgattcccatcaaactctctatcatctgcggtatcagcatctgaaacaggcctgccacaatgaccagcactaaagatacgctgacgaatgttccggccgccttggcaagccccgtcacatgcttttcatccttccataccttcagcagtttaagcttcactgctttggtcactctgttataaatcggcgtagtaaggtaggccagcaccgcgccgtagataatcggagccacaatcccgattatcatgtgtattacccgggccacctcggaccaatactggatgcagtaccaaaatacgatgcagaccgctatcacggcaaccgccgtcagccccgtataaatataacgtttaaactcattgtttttcatgtttttccctcatccgtaatcaagcgttatgattcacagccgtctctgtgcatcggtaaccggtgaatcaatcgttattgttcacacggttgtgttccgcgaggttttttcgtgcgcattctgcacgaaaatcccgaatttcacggcgcggcgcggcaaaaaataaacttttcaccacagtaaaacatgccgcgcccactcagggccgcaacataattcatcatcagtatacaggaagcctgctatatttggcaagtaatatcatgtgaagaattcttaacaaattctaaatcagttactgttcgctccctgccggacaccggcgcgctgctcataacgataacctgtaagccccgcgcatcaccggcttcaataacacgctgcgcgccgatgcgcacatgtcaccgcctgtctcttttgtgttcttctataatgatatccgcaaaacggctgcgttattccaattcctggaagtctttccaatctctgccgtcaatacaggcatcatcggcattccaaggagattgtaggaagtttgaaagtgaaacataagatatgcagaattgcagagacggacagaaatttcaaaaggatcaggctccggttgagggtccgaagccagagcagggaggtcatagccctcaactgttaaacgtatcaggggccggtgtgtgaccgctgtctttgattgatgacggtgacctgtgcgcggggcgtacaggttatcgtttatttattaatatttatctggataaaaggttttcccttttgtgctttccgccttgggctgaactgggaaatgttatacacctcgttatataatttactcagctcctgtaaaccgctgttgacatcatctaattcattgtttgccatagactcatcaatggtctccatctgtgccttaagcagcgggtctatgtatacatacagccggcagtaattaattttgtattcccttctgttttcaggcgtgtcctctgcgatacacttaccgatactgcctgcatattgttcgtaaagattcagacaacggtaatccttttctttaaaaccggtggatttccagaatgcatatcccgccattaccgcggcaatgatcgaaattattacgctccagacatttgcgtcagcatacatactaatctttctcccttcgtattttattcatcataccacaaaatccggcaaaataatactctcaaataaataccgtatcccattgacccgggcaatactctgtcttcagcaaaaaaacaaagcagcgagtaaactcgctgcttcttatcgtttgtaaccccaaaatgccggctcttacagtattgacgcctagctctgctaggtgggcaacctcacttaagcttctgccttccactcataggaggcctgacatccgcttaaaaatattggaatcccgttatgtccgatgtaggttcaaaaaaagtaagagttatcgagcattccaggaattacaaatgctctttttgatatcgttattatacaccagttttttgtctttttcaagctccatttactggccctattcttaaggttttcttgtgcagccgattttttccctgttttcaaggattttccatttttattttaatcaaaccgtttggttccatccctgcttaccctggcatataccagcatttttttctccggcgcggactctgtaaaatgataggaggaaagaagctttgccccggctgcttcgaaaagagtttcgtctgaggcaaaaagttccgccaatggttcccctttctgtacatagtcgccgtacttcttatggaggatgattcctgctgaattatctatcacatcttctttcgtgctcctgccggccttaagaagaaccgaggcgattccgcatccttccgtatccatgtggccgacatatccgtcctgcagagccgtcaccttcctgctgtacggcgcctttaaaaactgtttgggattctcgatgaaagaaggatctccgccctgagccgccaccatcctcttaaatgtctcaaatgcccttccgtccttcaaagtctgctccgccatcccataacagcttccggcatcccccattcccgccgtatgcagcatctccgcggcgagtctgaggctcacttcctttaaatcctccggcccatttcccctgagcgtttctactgcctcaatgacctccagagaattgccgattgcagctcccagcggcacatccatgtccgtgatcaaagccgtacaggaacgcccggccccattaccgatggcaaccatctttcctgccagggtaatcgaatcctcaagcgttttcataaatgccccgctgcctgttttgacatccaggacaatcccgtcgcttcctgccgccagctttttgctcataatggaggaagctatcagtgggatactgtcaaccgttgccgtcacgtcgcgcagcgcgtaaatctttttatccgccggaacgaggttgccgctctgccctaccaccgcaatccccgtcttttttacaatatcaaaaaattcgctgattgggatggcagtcctgaatccgggaattgcctcgagcttgtcaatggttccgcctgtatggccaagcccccttcccgacatcttagcaaccttcactcccagggaggccactaccggccctgccaccagtgtcgtcttatctccaactcctcctgtactgtgcttatcggccttaaatccttcaatcggtgataaatccaccatgtctcccgaatgggccatctcaagcgttagctgtgtcatctccgtatcattcattccgttaaagcagattgccatcagcatggccgccatctgataatccgggattgcaccttctgtgaatcccgaaccataaaacgcacctctgcttcatcaagactctcatttcttttcttcttttcaatcagatcatacatcctcataatctcagcctcctttataccgaactgttacagattttcaggcccaaagctcacaggcagcagttcttccagggaatatatcctgtagtcctcctcggaagcggccaggattatctggaagctgtccaggctgcagaattctctcattacctgcctgcatatgccgcagggtgcgcagtagccggccggccggccgttttttcccccgcatattgctatcgccctgaaatccctgtgcccttcgctgacagctttaaaaaatgcggtccgttcggcgcagttggtggccggataggaggcattttctatattaacgcccgtatggacagagccatctgagcaaagaagagcggatgccacatgaaaatgggaatagggtgcataggaggacgcaagcttgtcaagggccgccctgattaaggcctttgcctcttcggctgtcactccttggctgacagaagcgtctgcctttggccggttcacaatggtttcattcttttcttccatctccattcatattcctccttgaaatgttctttacaaagtggatcagcagcatagcaatcacggcaaaagcaatatagccatacaccggataaagcacggaaatcagactgccgaaccccagctggctccctgcccatgctgccaatcccaaaactgctgaaaataatgttttatgcttcctgatacgctcaaaccggctgaaatacctgggaaccggcgtgaataccgacatggccgctcccagcattgcacagagcagaaacaacgcgcaaatccaggcgagaagcgggtggaccatcccggcaagagtcaggattggcagttgtgtgtctgccgccgccttcccggaatgcattgccagcaccagacagagcccgataataaacaggaacaggccgcccgatagtacgcctttaacggccggtttccttgaactgttggccaggccgagcggcgccagcgcaccgatggcgcagaaaaaattataggaagtaaaattagcggccgcaatcccccagtttcccagcaaaggattggaggccgcatcggcagttacctcaatccgggcaataccgtttttaccgatgacaatcagcgcagtgacaatggtcagcgtcaccagcaccggaacaacgcggccgaaggtcttcaccacggcttccacgcctcccagagatattaccgtcacgatggcgcagaacacggcgctgcccagtatccgagccagatggctgccggtctggctctcaatcaaagtcccggctccggaagccataaccgtataaatcccaaacataaaagaaatctgcaccgctcctgtcaccccacgcagccatggaatatccgacggaatcacaacacggtccatctctcccgttccgctcattccggccgtcaaaagcagtatgagacccaggcctgtcagtatcagacatgccgtaaataaaccgagaatcccctgtattccaaagcagccgaagtactgccaaagctcctgtcccgagacaaatccggcgccgagaaagcagcccataaaagtggcgcaaatttgccgggtacctattttttccatctatctcttcccctgatcaatgtatttactattatgatacgttttaaccggcagaatggcaagtgttatattttaagaaaaaagcggacagaaatcatggttctgatcctgtccgccgcacccggtattccgcccgttaactttttatctccggttatgactgttctttgataattttgactacacggcttgttcccagacggtcggctccaagctccatgaaacgcttggcatcctccagggaaccgattccgccggccgccttgattttcaccccgctgccgacatgagccgcaaagaggctgatatcatcgaaagtggctccggatgtggaaaaaccagtggaggtctttatatagtctgccccggcctccgtcacaagtcggcacatcgtaatcttttcttccctggtcagaagacaggtctcaatgattaccttaagaatcttaccggcgcaggcctccttaattgcttttatctcatggagaatctgagcctcgttaccgtccttcagatccccgatattgataaccatatcgatctcgtcggcgccctcctctacggcagtcctggtctcaaatacctttaccgcctccgtattatagccgttcggaaatccgattaccgtacagatacgcatcccgtccccaacatattccttggcccgttttacaaaggagggggaatgcatacggacgcggtgtggtacttcattgcgtcgtcgcaaagctcttttatctgtgcccatgtagattccggatgcagcagagtatggtctaccgctgcaagtattttttctttattcatattatcatctccctgtttctccggagcgtgtctgaaaatttctttccatcaaatatgcatcacacttggcggaaaatttggtccaaatgaattttcagacacactctaatttattatttcaaaacttcgttcataaagctctttcctgccgtctcgcccggcacttccagatattccagcacggatgcggcgatatcggcaaatgacgctctggttcccaggtttatcccggctttgaccggcgctcccgcaatcactagcggtgtgtactctctcgagtgatccgtggacggtgtgctcggatcgcagccatgatcggctgtaatcataaggatatcctcctcctttaatgccgcgagaatctgaggcaggcgctcatcgaaagaggtcagggctttggcatacccctccacgtcattcctatggccgtaaagcatgtcatagtccaccagatttgtaaagcagattccgttgaaatcccgctccatccaggatagcgtcttatcgataccgtctgcattgctgactgtccgcaccatatccgtaacaccgcttccggcaaaaatatcattgattttgccgactgccagaacttcctttcccgctccgctgatgtaattcagcatcgtggacttcggaggctcaagggaatagtcatggcgccttgacgttctgctgaagggatattctccttcaaacggacgggctattactcggcccacgccaaactttccggtacagaggcgtcttgcaatctcacaataacggtataattcctcaatcgggactatctcttcatgggcggcaatctgaaatacactgtctgcagaagtataaacaatcaatgcaccggtcttcctgtgctcttcaccaaaatccttaattacctcggttcctgaatatggtttattgcagagaacctttcttcccgtctctttttcaaattcatccagcagctctttcggaaaaccgtccggaaaggttggcagaggctgctctgacacgaggcctgcaatctcccagtggcctatcgttgtatcttttcctttggaccgttctgtcagcctcgcaaatgcaccggccggagctgcgctcccttcccggcagtccaccccgtcaatattaaaaaagccaagtttctgcatgttcggcatggaaaaggaggggctggaagccgcggctgctatcgtattgctgccggcatcgccatattcgtctgcatcaggcatttctccaatccccacactgtcaagtacgattaaaaaaacacgtttcatttattttcctctcttttcttttacaggcatacggcgccggaaagcgccgccttatttgtttcacatttacaagtatataacaggttgcttctgttgtcactagcatggcttgtttttttcattcaggtctgttaatattgtaacagtttaaacaggtctgttactgtgattattggcaatttaaagtatttcagtcgcataaatatttttgaagtcattcaataagacgcgtcgtttatataagtgagacagatgagaaagggggcggtcctattaatgcggaacagcagctggaacaatggataaaccagtatcagaatttaatatattcaatctgctacaaattcaccggcaattactttgatgcggaggacctggcccaggatacttttttatctgcttacaaaagcatggcctacttcgacggcagcaacgagcgggcctggctttgcaaaatcgccaccaacaaaagtctcgattacctgaaacgggcaggcagaaaatcagttcccactgaagacgtctatttttccgccatcgctgcgcctgaatcggttgaagagaaatacctggaaaaggaggtacgacagaagctttacgactgctgtcttgccctcaaacctccttaccgggaggtggcccttgactactattatcacgagatggaaatcggtgaaattgttaaaaaaacaggaaagaacataaaaacactgcagacccagatatacagggcaaagggaatgctgaaaaagctctatggaaaggaggaacctgcatatggaaaaacagcaacacattaatccggaatattttaagacgggactcagtccggaagagtacagccatctggcagcctgtccgttctgctgtgaacaatttgcagattatattgagaatcaggaactgattacggctcctgcgcacctgaaatcctccataatggagcgaagcagggacctggatgttcagattgtcgccggctccaatcatctatcaaaacggcttcagcttttctatttcagcctgaaggtgggagccgccgtactatgcgcgctgaccatgctgacgattctccccggcgtttccagggaaatttcagccagacaggatgcagcggccagacagagtaaattccggtcggaacagcaatgggactattacgaaacggtaaattatttaacggaacagcttggaaggctgtccaatatcaatatggaggtattcaagaatgacaaaaaagaaaggtaaattactaacattctgctggtccctgattcccggcgccggagaaatgtatcttggatttttcaaacaggggatcagcctcatggccgcctttgcagtattgctcggaatatcggggtttcttcagttgagtttcctgaccttcctatccccgattgtatggttttacagcttttttcataccaataatttaaattcattaagtgacgaagaattttatagccttgaggacgattacctgatccacttcagtgatatttcatccaatcaggataccgttaaaaagcattataagctgatagccggctgtctcatcttttttggaatcagtgttttgtggaagctgttttcgcggatgttattctggtatatcattccggccctgtatctgaccgacgaagcggctgaactgattcgttttatcaccaacacgattccccagggagtggtcgccgttgtcatcattatcgccggcatctacctgattaaaggaaagaatgacgagctgaacaaggagaatcacgatatccccagccctccttatcttgaaaacaaggaaaaataaaaagatataatgatgccttcaacttaaaaagccatgcggtaagacgagcccgcatggcttttttctatctgttctgctcccaaataccggacagtaaaagctgttccagttcctcaacgtccgccgccagatatccggcccccgcctttgtaagttcctcctgcgaaccatatccgtaaagcacaccgacacagcttattccgtgttttgctgctccttccacatcatgtctcctgtcgcccaccataatgaccggattttctgccggatccgctttgaggcggttcagggtgtactctatcacatcgccttttctcaccctggtttcctccatatcggctccgcccaccagcttaaaacaggaaagaaggccaaaatgcttaagaatctgctctgcaaacacttccggctttgatgtggcaacagccagcgtatatccggcttccctcagccggttaagcatttcctttatgcccggatatactttattctcaaacatcccctgttttacgaagtactcatgaaataccggaatggcttcccttgcatccttttcagtaaaaccataaaactcgataaagctgtccgtaagaggcggcccgataaacggacacagcttatccagctcctctacttcaattccataggctctgagggcatgctgcaccgattttgtaattccttctttcggatcggtcaatgtaccgtccaggtcaaacagtatgattttttccacacttctctcctatctttctcgtatattgaatatgatatttaacgattgcctgcacgctccgcgcacaggtcaccgccatcaaagaaagaaaggcggtacagccgctgccataccgtctttccatattcccgttatcctcttaacctaattcgtcaaccactttctgaattgcagccattgcgtcatcaggaagtttatcatagccctcttttgctacggcaaactctttaatctcatttaaccggtcgttcatacgcgccttaagctggcttacgtaatcgtgatcttccatgttcgggataaagccttcccaatctaaaatctcgatatcggagaatggaccccacttgtggaacgctgcccgtttttcaacaatcgcctccagaattccgagtgtatcggacggttttacctttttgcccatgaaatcaccggtatttacaatatagcagtcaacattcttctcttctaccagcttcttgaacttatcatagtcgttcgacagcggataggtgcggaatggattagcatacggaacaacgaccagtttgttcggatctgctcctggagccagacgctctgcggaagaccgtttggtagccagcgtagcgcccatgacggaagccagggaagcgcctttaagtttaactaccggaggaatcgtaggatccttcataatccagaagatcgcattaaccggagagtcaactctgtccacacggttcggggaccaaagtttagatttgatggcacgtccgttgccgttacggatatcttccgtaacaagctgaatcttaccgtcctcatctaaagtggcggaacagttctgcgctgtcagcagatatttattatcctcgcatcccgttggataatcggccgtcttatcaaaataggtcggctcgagagcaacggaagcacatgtgtctgtattgataacgaaagcatcatcatgaagaaccttgatctcatacttaccgccgtgttttgcatgggtaagcgtggatttaccggaaccggacaggccgtaaacagaagcaacatatttgctgccgtctgccagtgtgtattctttctgtcctccgtgacaggatgcatagccgttacggtttgcaattgcccatgccatggtcagggttcccttcttatgctcgccaaaatatctcatgccaaggatgcaggcgcagtttgtctccgtattgaagtagcacagagtcttcttctgcggatcggacaggcagtccagggaaacattcggacggtcggaaccgttccactgcggatcggagaagatatagatatctgcttcttttccgtcgcctaccggtttggaattcttgtacatctttacatattcatccgacatgtactggaagttcagcatccagttatacatgatattttcttcgccttccggaatcagcagatgggcttttaccataaactcagggtccagtcccacaaacacctctgcgtgatacatggttttccagcgtgattcgtaaatagcgtccatcgcaacgagatcgagtgccgcacaatctacacctggttctccggcaatacggcgtgctgttgcatagcgtcctgtaatggctccgtcgttaaataacagaacctttgcatccttctccaggccaaactcttctcctctgtatacaggcatgtccgttacaaccgttcccggagaattcttagctaattcatatgcttcctttaaggtgtttactttcaccacattgtttccgtagaaagcagcctcaataatggatcttgtcttagaaaaacctggctttccagcaccgatttcactaattgggtagtacgcttttgttgacatattagtcctcctttatactgcacctcaaatttgtatcaattatctcactttgttaaacaaaagtcaatccctggcatcataaaattattatgaaaggtattataaattttttagtaaagcggaccggtttcaacaatccgttttgtatacattgtataccagggaaaggcagtcaccgtcattgtgtacaaccggtaactggcattcctgttctctttttaccacaaaacagccataaccgaacacagtaccctgttaaatgaaaaaggcacagcgaccgtatctctcggatccgatcctgcgcctctttcgttaattgaacttttattagaactctttatttaaaaaattcatgccttccatgctgcatcacaaaggacagccgtccgtcaaaccatttaatattggatgactccgatccgccccggttcataaagtacaatgctccctgggagtaatcttcccctgccagcgcccgatccacgcagtctatcgtctgctgggtgactctgcaggtatttatgcttccgtcaattaccggcgaaaactgggatctctcatacaccacgtccgtaatgttatttggaaattccttgctctttacacggtttatgatgacattagccaccaggattttacccttctcatcacagattcccgcctcggcctgaacaattctctgcaggaccctgtaatctccttccgaatatttgattacagcctgttctttcttcaggcgcgcgcgctcctcgcgttctttcaccgctgcttcttccgcagcctgctgtgtctgcatcaggacctctctctcgattgcctcgatctccagtgcagatttcgcaagttcatcctgtatgtttttttccagcagacttcctataagccgctgcccctgttcttttgaagcggtaagcagaacttccatgtcagttccaaagcttgtactttcttcctccgactgcatcatgtccggcagtttttcttcctcatcattgttctcgtgataagctgcggccgcggttttacctgcgcctgcaaaactgctggaattaaaagataccaccgtcacaactgtcagtcccgtaaacagcactgcggctgtacggtacattttttttgtcacactaacaaccaacgatttgacaaaatggtaagcagtctgaagaaatgagtaaatgttcggcatacactctcctctttcttttcaactctttttttgttttgcagtgttcaaggggatgcctgtcccactgcctgtttcaagtgacggtggtaattatatgggagtttcgtaaaaactgtcaataactttttaacatttttgtgacatctcacagatacgcttaatttttccttaacacttatgttaaaaccctacaacaaatcaaccgttttttaccataatttttatatattttggcaaaagcttttttcatagtctattacatatatagcaaattcttccataagaaaatcgtgtcgttttatgacgcctgttttttatgtcaactgttttactgtttttttcactcgttcggaaaggatttaaaacagttcagacagtatgaactttcacgaggattttcacatttatttccatgctttctgctttttctttatatgagaggggcaaattccgcctccagataaccggccagcttatccggctctaccgatatctggacaccgcgctggccggcgctgaccgtgatacggtcataaagtatcgctgtttcttctatataagtagggaatctcttcttcatccctaccggggaacagccgccccggatatatccggtcaacggcagaagatctttcatgtggatcatctcaacttttttatctccggccgcctttgccacctttttcaaatccagttcctcatccaccggaatacagcagaccagataccccttcttctctcctttcagtacaagagtcttatacatgctgtcatgttccactcccatcatatcggctgcatggctgccggataaattgttctcgtcaacctcatactcgcccggaatgtattcgattccggcagcgtcgagaagtcgcattacatttgtttttgtcatgattttcacttcctgttggtaaatttgagcatttatagctgcttatgctggttatattaccatattgcgggggaagggtaaatagagatttagttaagcaggtgaggacgccgccggtacggccagcggacggggtggtggggtgtgtatatgagtctttcgtcccgggggtttggcatcgctggatggagaaggagatactgtggttttgttttcgcaaggcggagccggaagatgtcggcagtatctccttctcccggaaggttttcgctgggacgaaagactccgccaagtgtatcggccccgtccgccggcctgcggccgctgattgtctcacacgttaagtgcggggcggaccttgtcgcggccactcagtgctaccgtgtgcgggaaatacgatatgccttcaaggcgcccttatgaaagaattgtggaagatttgatatcggcctgccggaaacacgtagtggccgcgacagggccctccccatttaaggttggagacaatcagcgcccggaacggaccatgtccggtgtcgaaaacctccgcctgagtcttccgtccccggcgaaaaactgacccggggaagtaggcggaatcaattgcggagggggacatgggagtccgccggtgcttggcgaggtccctcacgagcttagcactgttgcgcactccaaagagtgcaaacggtccccgcagcaattcattccggccggattcccctccacaaccaacttcccacggggacggaagactcagccatccccctcaccacaccggacatggtccgttccggacgcgtcctccaacctcagttaaatctccatttgaaccggctgaaacggaaccgatgcaataccgacataccactcaatctccggcttttcctcaaaatacatggaggaacaggccgccctggtctccccctgcgtcaaaacggcagcaccggctgcgccgccgataacactggctgcaattgaactgactgttgtcttattcctaatcggtgaatccggcctggcacagtcgtggaccgtaaggatatcctctctgctgccggcagcttccccggacttgccgtcagactctgttctatattccaatacataatatttttttggaaaaacaagcccgctttcacccctatgcatatccggcataccgcactccaaatcatccatcgttttacagcggcatgacagaatatggagccggtattccttctcccggcagcgatgcggtacggtcaccgtgaacggcgcgcagtttactgccgttgtaaaacggtagccggaaggacgggtcaccctgtttgatgaaagtaacaggctcattgattttatatctgccatctccctctcccaatgaaacacagccctgtaaaacaaccaggcggagtccggggcaagaccgtacaattgcagcagttccttcgcccggatattcccttcaccagaatcatccggctgccagaccgttttgttccacccgctaccccttatttcctctccgtttatctcaatactaaatttgacgggaagccgcaacggatcatcgcagtttctcagcgcagactgctcctgcgtaagtaacgctctgtctttatctccccatttgtcccgaaatgaccggagcgcttccaccggtattctccggcaaatatctatgttaatttcctgagcatcggagtatgccgccggtatcacccactcataaccgccgcagtcaaacactttcctttctatatgaatcggacttccgctccctttatctttatcattatttctgtaattttctgctttcactctcttcacctacggttccctcttcctttttatatattgttggctgtttattctcgtgttagaattttgttaaaattccctatattgatgttataattccgttaaatttttaattttatctgaatatataagtattttgttatatagtatttagcttttcatatattatttgtaaatattctacaaatcagataaaatatctcatatcccgggtatctaaaagcaatccaattacagggcaggcaattacataaaaaaaccgcctgtcccaaataccggcgtgccggatatggcaccgccagaatcaaataggaggattatttatggaaattaaattggatatgacacaaactgtctgtttgggggttctggtatttttagctggtcaatttgttgtcagtaaagtccattttctggaaaagtattgtattcctgctccggcagtcggcggattgttgttctccattatcaatatggccggggttcagacaggtgcttttcaatttgcatttgaccagacattaaaagattttttcatgatcgcattcttttcaaccattggattcagcgcaagccttaagataatcaaaaaaggcggaattgctatttttatattattctgtacttcctccgtcatgctgattatacagaatgtatgggggttgcaatcgcacgggcatttggcttaaatcctctgctcggcatgtgcgcaggctctatctccctgatgggcggcgtagggtcgtctgccgcttttgctccgattatggaacaaaacggagccgtagggggcctgacttttgccattgcatccgcaaccttcggcctggttatgggcggtctcgtcagcggccccatcgctaaatttctcattgaccgccataagcttaaggacgtaagaaaaaccggcgttaaagaggtggattacggcagtattgaggtggatgaggaagccagtgtgattgaggtgtcttccatgcataaggcttttttccaaatcataattgccatgggtgccggaacagtcatatcaaaattaatcagtctgagcggaatggttttcccggcctatgtaggcgcaatcttcgccgccgcatttatcagaaatggcggagaagctgcgcatatcaaggtatatacgaaagaaatcgatgcgttgggcagcctgttcctgaatatattcctggcaatgaccatcatggccctggaattatgggagcttgcagcgcttgcacttcctctgattatcattctaattggccaggttattcttctcgcggtatttgccgccctgattatttacaatacaaacggcagggactacgatgcggcggtcatggctgccggtttctacggctatgcaatgggggctaccccgaacgcaatggcaagcatgagcgccgtcgtttcacattatgaccgtccgtctccaaaagcttttttcaccgtaccaatcgtaggcggctttctgatggattttgcaatggctattctcattatcactcatatgaacctgatactggccggggttctttagatattcccacagccgggtattcctcttgcagacacagccaggggaatacccggctataccagaaatttttctgccaccgctttcagagcgccgggattatcacgctgccaccgtataaatccctttccggacgcttccaccgccttgcccaaagccaggataaaatccggcgccttctcgtccggtatcactcccagtttctcccccatccgctcgcttccctgacgttcgcagccgtttatactgagctgccaggccggtaccgccgccttttctattcttatgatacagccctgaaagccaagctcaccaatctgatgggtcccgcaggaggaaggacagcctgatatgtgaatctgtggaaggatcccgtctgcaaattgcgcctccctggaagcctgtacgagtttctttaagagcgcctgcgaatcgccgataccctgctggcatacgtaagcgccgatacaggcagccgatgcctcgaaggccgtctctgcgcccccctccgtcaccttcagaaccccggcagcttcccgcccgtcgcagtttatgatatagaccgccccgccgggggtcaggcgcagctcaacctgttccatatccctgatcacattataaatttcccggaaaaaagacggcttcgggcttccgcccacaggatggtacaatacgctgtacagccccttttgcttctgctctattacccggggatgatcaggcgcaggactgcggccttctttgctcaccaagacgcacctgggattcatcctcaggttttctccgcaggtgagagccgattcaagcatctcacgaaatacctccctgtaacgttcttccccgcccagggtctctggtatgaaccggcttctggctttagcgcggttctcataatttccatattcgagatacagatcatacatggcctttacgtaatacagaatttgttccggctccaccccatccgccacctttatgccaaaggacggattgattcccagacctccggcggagtatacgtcaaacagcccgtccggccgcgctgcaaatccaagatcccggaatgtcgcatgcgtaagattttccgcagaatttgaaaatgcaaccttcagtttcctcggcagcattggcccgtgaatccggcttaaaagataatcggagaccgtaagagaataaggcataacatcaaaatactcctccttctccacaccggaaagaggggataccataacatttcttggaaaatctccgcctccgcccctggttataattccatgctccagcgcctccagggcgatcctgcatacggttttctcattcaggttgtgaagctgcacggtctggcaggtggtaaaatgcacaagatcgattccgtacgtttcaatgcatccggccacaaatgccagcttgtccttctccagacggccgcctggaaggcgcagcctcagcatgctggcattgccgcctctctgtgcataacttccaaatcctcctgatatgcctttatacgttttcgtatccagcgtcttattatagaaacgtctggtagcttcgataaattcccggtaatcctgtttccactgttccggttccagatttttgggttccatatattatgtcctttccctgatatcctaaaaaactttgacataatatatcattcctcagccgtttcatttcattcttccaaatatagccttgttacaggtgattccggcgcagctgctccatcgcccattcataatccttcttatgtacgtaaaatgtataggagcattcgtctcttgccataagtgccatcgccgccggtcccatcccgattcctctcaggctcccgcccggctttcctgcgccgctgcttactttgaaggtataattaatccctgccagggcgagagtgtccctgacctctgcctgtttttgcatattctgtgtgacatatacttcccttcggttaaagagtgtcagcatttaactccctccttttttatttttcctgtatatcatatatccggccgtgataaggactagtatcgcagtgcctatatataccggtgtgaaatcaatctttcccgctataaatattgcggtcggaccgtcggctcccccgattatggaaacggccgccgcatcctttttcgcaagatacaggccgccaaggctcagtataaccgctgcccccgttataataccaagaataaatccaaccattttctcttttcttttcatttctatcttcctcttttctttatctctcaaatcccagaaatctggttccctggaatgtcagacgcccgctgtcaccttctgcaagcataccgtattcactgcttttcaccgacagctccatgcggtctccgctctccacctgaaacgttacgtaatagctggtggacgaagccatatgagtgccatgagcgcctgtaatatcaccggcgttgtgatgagtgtggcggctgacatgagtacgcttcgccacgatcgacgcttctacggtcagcctgggagactgattgttcttattccactccccgataccgcggataattgtaaaaatgatcaggccgaatactgtaataaaaatcagggtaaacattatctcaaatccgcctccgaacataaatgaatctatatacattactctcctccttatctgattacagtatatcttatttagcctccccgttttttacttttttctgacaaattctgtaaatgtttcattcttatgaatgaacgataactgcacgccccgcacacaggtcaccgcaaaaaagcaggcccggttaatcccggcgcctgcccgcatcgcatttacatcgttatttctggttaatataattcaccaggcctccggccgtgatgatcttctgcataaattccggaaaagcctgtccctgatagcttgtattcttcgtcttgtttacgatgattccgctgtcgaagtccacttccacctcatccccgttcccgattgccattgccgcttccggacattcaataatcgggaggccgatattgatggcattgcggtaaaaaatcctcgcaaatgtctctgcaatgacacagcttacccctgcacatttgattgccagaggcgcgtgttcacgagatgaaccgcagccaaagttcttattggcgactatgatatcgccgtcctttacctttgtaataaattctttgtcaatatcttccatacaatgcttagccagttcttttccatccgtcgcattcaggtatctggccggaataatgacatccgtatccacattatcgccatatttaaacacatgtccacatgccttcatctttcttcctcctcatcaattcccgctgctgtgccgtccggcacagctaaggtcggttcaagcattataatcccagttcacagggacagcttattttgcctgttactgcactggctgccgcaacggcagggcttgccagataaatttccgagtccacatgtcccatacggcccacaaagttacggtttgttgtggaaatacatctctcaccctctgccagaattcccatatagccgcctagacacgggccgcaggtaggcgtgctgacaacagctcccgcctctacaaagatctccatcagcccttctctgatacactggagatagatagcctgagtggccggaatcacgatacagcgcactccctttgccaccttgcgccctttcagaatcccggcggcaattctcatatcatcgatccgtccattcgtacaggaaccgatcacggactggtcaatcctgacctctcccgcttcttcaatggtccttgtattctcgggaagatgcgggaatgcgattgtcggtttcagttcggacaggtcgattgtataaactgcctcatattccgcatctgcatccgcctcatagattttataatcacgtttggaatgttccttcatatattcttccgtcagttcatcgaccgggaagattccattctttcctccggcctcaatcgccatattgcagattgtaaaccgatcatccatggtcaggtttctgattccgtcgccgcaaaattccatagatttataaagagcgccgtccacgccgatcatgccgataatatgcaaaatcacatccttgccgctgacccatctggaaggttttcccgtaagttcaaatttgatagcggaaggtaccttgaaccaggccttgcccgtcaccatgccggccgccatatccgtgctgcccacgcctgtggagaatgcgcccagagcgccgtatgtacaagtatgggaatccgctccgatcacagcatcccccgccactaccaggcctttctcaggaagcagggcatgttcgattcccatctctcccacatcaaagtaattggtaatatcgtgccggcaggcaaattcacggcagcatttacagttctgagccgatttaatatccttgttcgggataaagtgatccataaccagagctattttctcattattaaaaacggtctggttatccatcttctgcatctcattgatcgcaaccggcgttgtgatatcattgcccagcaccagatccaaatctgcttcaattaactgtccggcttttacctccgaaaggccggcatgtgcagccagaattttctgagtcattgtcattcccatgatttgattccctcctaaaaattatgtatttacattatagcatcggccctgttataatacaaatatataatacgaatatatgttataaacctcggttataggcagactgcaccggcccaatctgtacagcctgcccatggctttcaaacatatccagataaggggagtcattatggaacagcatttatcccaatataaaattttctacgcggtagccaaagccggcaatatttccaaagctgccaaagagctttttatcagccagccggcaatcagcaaatccatcagcaagctggaggagaatctgggcgtctcattgtttacaaggaattccagaggggttcagcttaccgtggagggacaggtccttttcagccatgtcagcaatgcattcgatacactggggcggggtgagaacgagctgaaacggatcaagaattttaacatcggccagattaaaatcggagtcagcaatacgctctgcaaatatattctgctcccatacctgaagggctttattgatgaatatccgcatgtcaagattatgattgacagccaggatacggccagaactatctcgatgctggaacagcagaaactggatataggcctgattgcggagccaaagacaagaaggtcgctctcctttatgccggttatgagaattgaggatacctttgtctgtactaaatcctatctcgataatctgaagatccgggagggggaggatgtgaatatcttttctgccggaacggttcttctgcttgacagaaataatatgacgaggactcatatagacgcatattttgcagaacataatatagaaataaagcaggttctggaggccaccacgatggatcttctgatcgaatttgccaaaaccggcctcggagtcggatgtgtcatccgtgaatttgtccgaggggaactggcagacggttccctgattgagattcctctcagttcccctgtaagaagcagaacggtcggatttgcttataatcctgcttatgctactaagacaatgaacaattttatccgcttctgttcatcaaagtgatcgaaaaaggataccgtcccagcagcgctgagccagtatccttttcagatttatttggttatagcttttcaaacagagaacgcacctgcgcctccgtcacgttctcaatttttttccccgccacatattcaaaagcctcctgccattccctgtcgctgtaatggtccggctctatttccgatactgccctcttcacctgctcaaaccggccggagtcatggagatctgatatatacaggcatcccacaattcgtctcaattcgtctaaaatccccttgctcttttccatccacctttacctcgtccaaacaaatagaagttttatttccgtcgtatcacgtttaataccatacacaatctattttatggcattatatgcttcatgtcaatctttactgcgcatataatgcgctaatttttaccagtttatggcataaactatacgtataaaggcggtgcaacttatgtatagcgaatttgactttggaagaagattgtcgcaactgcgcgaaaggaagggagtctcagcgcgtgatatgagcctttccatgggacagaaccccggatatatcaataaagtagagaatggcaaggccatgccgtccatggaagtttttttctatatctgtgaatttctggccatcacaccatctgatttttttgacgaaaagaaaaaagagccctggaagctgcatcagcttacggaagagtgccgttatctgagcagtgaaagtctggaacacatcctggctatcgtgaaagggctggctgaacacaaccgatgaagccgtttaggaaagaatcccgcgagcgggattctccgcctgcagcgggccgctgtggcgacataattccttaccgccgcaggcattggctcacttagctgcttttttcctgttattaaaattaaaaatctgtccttctaaatctgcaatcgttatatgcttcagctcttcccggcatttctgatccagctgctgatacaggccgtccagcagcccggccattccggaggcaatcaggcagttcttctccagatttccgcttttccaggaggatgatacaaacgccactcccagcgcatcggcaatcatgcacaagtttaccttggaggcatcggcgctgaactgataccctccgtccagtccctccttcgtcgaaacaaggccggcctttttcaggctcgccagaatcttcctgactctcgccggatttgtgcagacattctccgccaccatctcacttgaaaccaccgtctttttatggtttaaaaatactaaagcatgtacccctactgcaaattcacctgtcatccttctattcctctttcactgtttcataagtccagtcgataattcctccaaaatcataaacctgcgaatatcccatctttatcagcttgtcggccgcctctttgcttctccggcccgaccggcagtataccagaatcttattctctttctcactcagcagttccggctctgtatccgctatttcctcattcggaatgttgactgcacccggcacatggccttccttatactcctggagtgttctgacgtcgacaatggtcacatcctcattgtccatcatatccttcgcatccgcggccgtgattttgtgatacgctttgttcttctgcgtttcttcctgcgctgcggcattcgcccgggcacatccggacagtcccatcataatcagaatccctacgcctaataataccttatttttcatgttttttcacctgttttgtaaaatttgtcagttaactggtacctgtgtttctaccgcttcctccgccggtcctgccggccccgcagcctccggctgttccggttcaggagcctgtacgtctccgccctgtgtcccggcagcgccttccgaatctgccgcgcctgccgattctgccgcgcctgccgattctgccgcgcctgcagtctcttctatctgagggaatgtagtattgcgctgaattaccccggccttactcttataataactgttatgcagcggttcttctttcaggacctgcccgtccttggtcaggacacggaagcttttccagacagaaccgttctgtccctgatccactatcttctccgttccaaacggtaattgcgtgttttcttcgtaggacggcgcagtcggttccgcatcccgtaccttctcggaacggatgctgaccttgaccccgtcgtccagaacgggaatccccacaatcgacagtttcagctccagtccgctgaccgtggcccgcagtacaaccggcgcggcgcttgtattaacgaattttaaatccggaccggcatagccgtcaaagctgaccatagcatcctgccccttttcgacataggagggggcaaaactgtgcgcgttccgctccgttgtcttaaatccggcctcaatgatcgagtggtaaagtgtggtggagacctgacagacgccgcctcccggctcctctatcagtacgccgttccggtaggctccggccggctgatatcccttttccttcgttctgttccctgttgtattgttgaaggaaaattcttccccgggctttagaataagcccgtcaatcgcctctgctgccagggtgacgtttttattacggtttttattattggttaatttcgttgtaaaggttccgattacctgatactgcgcttttgcctgcgcctgggtacgggcgggcggtgtaatggaaaatgacgcttccaccggacttttatagtccccctctctcaccgaccgcataatggacgtcaccagattatcctgatccagattccgcccgttccggtctttggaatattcatatacgcctgtttccttgttataggacaccacattggaatccacaggcttttgatcccatttgtctgccagtcctgccgcctgttcccggatatcctgctccatccgctcataatcaaaggaaagctttacttcctctgcctgtccgggcgcgctctccagtatgcgcgcaatctccgcctccaccggatttctcagttccaccgtctcatccgggccctgtaccttaatgggacctgaaaatttttccgataaaacctttgccgcttcctctttggaaagtccgctgatatctatgccttccgcaatcactttctgctgcggctttctatctgcaccctctgcgtctgctccggccccgccgctctccggcctctgcagctgcgtctcgccgtatacggctgtctgccgcttctggagcagcggcacagtgacggcaatcactgcggctgcggcaataccggccgccccataaatgaggaacctgcgcttttggcgggctgcggaattctttctgcgccttgacatattgattcttctttccctgcttcctggtttattatattttcctgtcattttatcatcgtccttttagaatggattttttcgagaatattatatccattttcttccatctgtattttttcaaattacagtttgtactgttacaatatcagatacagttaaatctgtcaatatcttttttaaaaaaatcggaagaaagaactccgctcgagagattctccgcctgcggcgggtcgcttcggcgacttaattccctatcgccgcaggcattggatcacttagcgaatgtaacgagcttagtgaacaagccctctttagagctgcgatcctccgcggagcggtttttatttaacaggagaactttcctgttaaacgataatctgcatactccgcgcacaggtcaccgccttcaataaaaaagacacccgacagtcatctgaactgccaggtgtcacgcctttacgtattcggtagtgaaatcgttaaccatactggttttctgtttgccaatcaaatgttctaattcatcggcagataacaatccttttaaataaatctgcacaatttcaacctgaccggagccaatttcagctacaagctctaatttactaatttctctcacctcctgtctctaacatcagcttaataatatcacagcattggccggcctgctttaaatatcagtaaaggaattgtattttttatgtaagtttcgctttcatcacgcattcctgttaaacgataacctgcacgctccgcgcaactgtcaccatcatcaattaaaaagacggcctccgcaaagaccgtctcatccctgatttaatcatattctgattatcagttatcaattaatttgttcgtatcgttccagctgtaaagcttacgcagttcggttcctgtactctcaagcagatgggccgcttctttctttctcatcgcattgaaatgcgggcagttcacctggttctcaagaagccagttctttgcgaatgtgccgtcctggatatcggtcaggatctgcttcatggccttctttgtctcatctgtgacaatcttaggtcctgttatgtaatcgccgaactcggccgtattggaaatggaatatctcattcctgcaaaaccgctctcataaatcaggtctacaatcagcttcatctcatggatacactcaaaatatgcgctctcaggctcatatcctgcttctaccagagtctcaaatcctgccttcatcagggcagttacgccgccgcagagaactgcctgctcaccgaacagatctgtctcggtctcctcacggaatgttgtctgtaaaacgcctgctcttgctccgccgatagccaatgcataagccagtgccttgtcatgtgcttttcccgtataatcctgatgaacggcgatcagacatggtacgcctcttccaatctggtattcgcttcttaccgtatggcccggtcccttcggcgcgatcatcgtgacatccacgttctttggaggtacgatctgtccgaaatgaatcgcaaaaccatgagcaaacatcagcatgttgccttcgtccagattcggctccacagactctttatacatctgggcctgcttctcatcgttaatcagcaccatgataatatctgcttttttagctgcttctgccgctgtataaacttcgaatcctgccgcttccgctttagcccaggatctgcttccttcatataagccgatgattacatgacagcctgattcctttgcattaagtgcatgggcatgtccctggcttccgtagccaatcacggcaattgtttttccttctaataatgataaattgcaatcttcctgataataaatctttgccattctttgtactcctccttgggatatgttaaagttgataattttataaagaatgccgccgacgcctctctgtacgcctttggcgacactttgtaactcggttacggaagaaaacggacgtcgtctgcccctctggaaagccccgtaagtccggttctcgccagctccagtatctcataatcctccagaaggttaatcatcgcatccagcttggactggtctcccgtaagcattaccgtaacggattccttgcccacgtctacgattgaggcacggaaaatctcggcgatggcgttaatcgccattctctcgctggcattcgccctcaccttcaccatcataagctcccgatagacggaatgtccctcccggagttccttaatatcgtgaacatcctcaagctttccgagctgcttctggatctgttccagaacctgctgatcccccagagacactaccgtcatcctggaatatctcggatctgccgtgacacctacggtaagactttcaatattatatccgcggcggctgaaaagtcccgctactcggctcaaaacaccggcggtgttatctactaataatgataaaacaattctgctcatctgcattccccacctcgctatgtcatgatgttggggtcaaaaggtcttttgacccctttgataccggattgctccgcgctgcgtgctctcacaatcctcaaaaacattcgcaatccgctcatttttctgcgaaaaatggcttctggtatcatgtaatacagttaatgataacaatcaaacctttctttgtcaactaattaaaaggaatgggtagtattacttacagatataccgctcttattccgcaattttttcatgaaattaagttgacagcttctttttgttatgtcatactttaataagtagttttaataaccacatttggaggttcttgattatggaaaataagatgaatgataatagagttccccgtgaaagggtggccatcctgattgattccggatgcgatgtgacagaggaattaatcaggcaatataatatgaagcttctgcgtctgcacgttatctatccggagaaggattattccgacgacttagatatttcaccgcagactgtgtacgagcgttttcccggagagattccgcatacctccaccccaagtccccaggaagtaaaggatatggcagatgagctgaaacgggaaggctacacccatgtgctggcctttgccatttcaagcggcctgagcggaacgtacaataccatgtgcagcgttctgaatgaggaagaggaactgacttcctttgtccttgatacacgcaatatctccttcggttccggggttctggctgtctgggccgcccaaaagctggaggaaggaatgccttatgaagagcttgtccggcttctccccggcaaggtacaggattctaaaatcttatattacatggacacgctgacctatctgcagaagggggccgaatcggacttgtcacctccatcgtaggcaatatcctgaacctgaaacccatcatctcctgtaacggggaaggcgtttattataccgtcgctaaaatcagaggttccaagcagggtatgacaaagctgttagccgaggcaaaagattttgccggagacggacccgtatggttttccctgttaaacggcaacgctgccgccgcttccaacgagatgcttaagcgtattaccgaagcgctgcctgaaggaaaacatcttctttcaaagcagattgccgcctcccttgccgtacataccggccccggacttctgggaatcgggatcctcaaaaatccgtgatgatttcccttcaaaaataactccattcgaatattgtaaagccgcagcagtctgtcgtttattccttgagccaaataaaccggatgctgcggctttttaattgaaggcggtgacctgtgcgcggagcgttcaggttatcgttacagtagattctgctgtatattggtaatatttctccatcccctggaaaaaaatcccaaattttagtatacttagtaaatgactgtttttaatccgattttataaagggggagcggatgcatccaaatcaattattcattgaaaaatcagaaaagattctaaggaccagaccaaagggctgctgctatcttctttatctggacataacagatttccagtatatcaatttctgttatggtactgaagccggagatcgtctgcttcaggcagtgaatgattatactgccggcctgccctttgtgcttctctgtgaaagactgtactcagattattttctctgtatcctgtattttcccggagaggcgccggatgaaaaagccgtacaggctgtggagcacagcctcaatggttttatggccgaacagcagaagctgtatccggcctgtaaactgagatttgcctgcggactctgccgtaccggtacgcaggaattatcacataccattgaaagcgccaatctggcccgtaaggaggccaaacggctggacaccagctcagccgttctctacagcgaagaactcgtccaaaaaaccgtcacccgttatgagctggagcaggcactgaatcaggctgtcagggagcagagattctgtttctatctgcagcccaaagtagatctgaccaatggacggatcatcggtgcggaggcactggcccggaggattggacaggacggcaccgttatataccccgacagtttccttcccgtgatggagtcctccggaactgtggtagagctggatctgcttatctgcaggcaggtctgcgcttttttgtcaggaaggatcagacaaggcctccctgttgtacgcacatccgtcaacctttccaggctgcatattaaaaataaggatacagccccctctcttcacgcaatcgcgcaggagtaccaaattcctccggagctgctggaatttgaactgaccgaaaccattctgctcgatgaactgaccggtgcaaaaaaactgattgaccagcttcgcacctatggttaccgtgtctcaatcgatgattttggttccgggtacgccggtatcaacatatggcaggagctgaattttgactgcctgaagctggacggatgttttctctccgaagacccagaactgaaaaagaaaaatgaggcccttgtccccaatattatcaatatcggccaccgcctcggtatcagtatcttatgtgaaggagtggaaacggccggacagtgcacttacctgacacgtctcggctgcaccaccgtacagggattttacttttcccatccgatagctccggacgttttttatgacatttaccggaagcagaacggttgttaccctcttcctttccggaataaccacaatacggaacggacggctcatgaatccggtggattgccaaagtccgatgtggatccgtccttaaatccgtccctgaatccgaaatggtatattccgctttccttatgttctctatttatggcggtatgtgtgattctggccaccatattttaccagcatattgcccgggagcagtttaatgaactggtgctggagaatctggattcctgtatgaacggacaaaaagcggagattctttcgggcattgaaagtatgagttcaacgctccggaacctttccgtgctgatttcccagcgcggtgactcgaaacgggcagaggaattccttcaaccactgaataaaggcgagcccccgggcaaatattcctggctgtccgcagcgaatatagaacaggcagaagaattattccccttaacgcaggaggaccagactgctgcgctccggctgaagaagggagaaaccgtcatatccaatctgattccttcccatcggccggataatttatattattatgccgtggccgttccagtctttgaaaacggtgttttttccggtgcgatttgcggcaccgtcaatgcgcagagcctcaccggcacctcgctctattctacagcccagggctctgttatcggctgctttatcacagacggcaatggaacggttctgccgtccgcaggagaagaagaatacgccacactggccggatgcattgcgaagctgaatatccggccggatgcacattcctctgatatcgccactgttttatcagcgccgtccgggaactggaaacttggcaccagagaccggatccccttctatctgtccagggctgatttaggcattaacgactggcatgttaccgtactttacagggcagataaggccgccgcccgttcaaacaggattaccacggcctctctctgttgtacggcagctttgtttaccgctataatattgatttacctgattattttcctgtatatgaagaaaatccagaagaaattttccatggaggagcagcgctaccttcttctggagcaattctccgatactgtgcttttcgattatgactgccttaaagacacaatccgctttacccctaatgcagacagactgtttaaaatccacgatctagtgcagcacaattacctgcacggcctggatgtcaaatatatctatgccggagacatggaaataattcagtcactgctcatgggccaatccgttcagaaggaaatccggatccggcttcttcatccgactgaagaccgctatttctggtgccttgcccagttccggtatctgtttgaacatggtactctcgtatctgtcgtcggaaaaataacagatattgatgaacagaagctgcatgaagattatctgattgaaatttcggaaaaagacgggctcaccggcctgcgcaacagagcctcagccgaggcaaaaatcagagaaagcatccaaaacggagccgacggcaccctccttatgatcgatgtggataatttcaaacaaatcaacgatcagtttggtcacaccgccggtgacagcgcccttatttttctggccgattgcctgcagaagacgttccgctccaatgatatactgggccgggccggaggggatgagcttatcgcttatatggaaggcgtctgcaacagaaatattgcccaaaagaaggtggaactgctgatgtactacatacgccaaagcaccagccagggtctcccctttatctctgtcagtatcggcattgcgctctgtcctgatgacggtatgtcttatgaagagctgtttaccgctgccgatcaggccatgtacgaagctaagaacagggggaaaatgcaggctcagttctatgaggatatggcatgataatgctaaaaacatgcttttccggcttttcttcaccttaactgaaaaacggggatgcaaacgcatccccattttcaataaccggatttgacatcggccgacggctcagtctttttccgtcacatcgctcctatccggctttcccagtcactaccatatttaaaggccatcttcatctcacttcccacactgataaaaacctcgtcatccggaatctcctccctgcggtaccagccggcctccgacagctcatcctcctcaagccgaatcgtatcgtctccgtccagttcggcaaaaaagcctatcatctccgtatcggtaaatgcccatggctgacttttgaaatagcggatattccgaaccttaagtcctacttcctccattacttccctctgcaccgtctcttcaaaggtctccccaatctctacaaaaccggctatcagggcgtagcctctatagggcctgtcgcggtatcttgacattaagagcttatctccgttcgtgaccgccacgataacggccggtgaaattttgggatactcaatctgtccgcagaccggacagacgagggcgcgttccgttgtactgtccgttgtgcccgcaccgcagcggccgcagaatttcctgctctcccgccatctccatatctgggtcgccgtgatagcggcaaacgcctgatacattggttccatcagtctgaaatactgtgtccctttaaaggcaaaacggccggtttctgccactgcattctcttccttattctctatcaggaaataagatttttcatcaattgcaaacagatagaccgcccgttccacggcatcggcaaccacctccgtaatttcagaaaacaggggaatctcatagaccgcttccggtttctgcgcttcccgtctccgggcagccgtagtctgttctctgtcaatcagcagagtccggttattatgtatcaccaaaacataatccgcagcctccggcctcctcgtcttaaaggcgttgtcgtatctgtgtggggcaatatcctgaatcatagcgtgttccatccttttcgtaaattctataccatctttcgattgaattattatattgctttttttcgatacttgcaatggtattgatgaaaattacgccgccggattcactatagttctgatctcaacttcttcaacaatttttttatctcttcttccccggctgaagaatacagctttccgtccagcagaaaattcggggctgtcctgcattgcttcaggcagtccctggtctccagcaggactttcttatccgaagaaagggcgccggaagccgggatcttccctttaatcccaagttctttttttactgtgtccaggagattttggccttccctgtgacagttttttccggtgcagaacgtcatcctgtgccggtagggagccggtttaaggctcttgtaaagtttcatgatacagtcaataacagacagcttgactcctgccgcttcagccgccatttccttatgttcagcagaaatccagccgtaaagctcctgtatttcctgcatcatagacacaatattctcctgtgatgagggtgaagtcatgctgctgtaataactcagtatttctttcagctcttcctcccgtctttcctgatccgttcctgcctccatttcccgctcggctcctgtctttccacgcttatcctgttttttcatgctgcttcctctctcctgcttacactttttaaaatagtatggacacagtaaggaagtattatccttttagcagataatcatgtaccaaaatccgaactgatattaccgcacttctgcttatgacagccggcctttaaaatcttcataaccaaattctttcaccggccggaaccttccctgtaaatccctgagtacgagagacggcaaaggcattccgttaaacgtgttatttttgaccatggtataaagcgccatatcagaaaatatcaccttttttccttccgtcagcggcgtgtcgaaggagtagtcgccaatgacatcaccggccaggcaggtcgggccgcccagacggtatgtgtgcggcttttctcccggctccccgcccccaagcaccggcggcctgtagggcatctccagcacatccggcatatggcaggctgccgacgtatcaagtaccgctatctctattccgttttccattgtttcaagaaccgtggagacgagaaaaccggcattcaggaccacagcctcccccggctccagatatatttccaggccgtacttttccctgagtttcaatatcaggcgtatcagcctctcccggtcataatcttccctggtgatatgatggcccctcccaggttaagccatttaaggcgcggcagatagtttccgaacttttcctccagcgccgcaagcgtcgtctcgagggcatcggaattctgctcacagagcgtgtgaaaatgaaatccatccagatacggtaaaagttccgtttcaaacttccctgcgctctccaggttccgctttgtcgtccccagtctggagccgggcgaacagggatcgtaaatcgcatggccttcctgtgtggagcattcggggttcagacgcagcccggccgactttcccgccgctttgacccgttccccgtatttcttcacctgggacggcgaattgaagacgacgtgatctgcatatctgagtatctcatcgaattcgtcttccctgtaagcggccgaaaagacatgggtctccccgccgaattcctcatgccccagtctggcctcgaaaagtccgctggctgcacttcccgccagatattcccggagaaggggatagacggagaacatggaaaatgccttctgggccagcaggatcttacatccggccctcccggaaacctccctgagaatctccaggttctgttttaacagtgtttcatccaccagataatatggggttttcagcaatccatcccagtattccatcgatccttctcctttattttccagtattctttttcattatttattaatccaccagcgccggctcaaaggactccttccatggaaggccccatttattcagcgcatccatgaacggatccggatcgaattcttcgatattccagacaccgggtttcttccaggtaccgttcataaccagcattgcccctatcatggccggaacgccggtggtataggaaattgcctgggaacctacttctttatagcattcctgatgatcacagatattgtacaggtaatacttcttctctttgccgtcctttttcccctggaaaatgcagccgatattcgtcttgcccaccgtgcgcggcccgagcgaagccggatcggggagaaccgcctttaaaaactggagcggcacaatctcccggccctcgtacataatcggtttgattgatgtcatccccacattttccagacatttgagatgggtcagatagctctggccaaaggtcatgaagaagcggatgcgtttgattcccggcatgttcagggccagtgattcaatctcctcatggtggagcagatacatatccttctttccgactccctcaaaatcgtactctctctttatctccatcggctccgtctccacccagcggccgtcttcccagtaggagcctttggcagatacctcacggatattgatttccggattaaagtttgtggcaaagggatagccgtgatcacctccgttgcagtccaggatatcgatatagttaatctcatcaaattcatgcttcagcgcataggctgagaatacgccggtcacgcccggatcaaagccgcttccaagaagggccgtaatacctgccttttcaaatttttcacggtactcccactgccatttatattcaaatttcgccgtgtcctccggctcatagttggccgtatcgatataatgggtcttcgtcgccaggcaggcgtccataatcgttaaatcctgatacggcagcgccagattcagcaccacatccggtttatacgcttcaatcagggcaaccagctcccgacattgtccgcattcacctgagccgtctcgattttcgtcctggtggagccttccagcttctcttttaacgcgtcacactttgattttgtacggctggcaatgcagatcccctcaaatatttcgctgttctggcagcatttgtgaattgccacggatgcaacgccccgcagccgataattaacgcttttcccatgctttattcctccttgcatttctctgctttatttattgttctgtattatttaataattcgtttaataccctgctttattgcccgatttatttattgcctgctttatttattgcccggttttatactatccgacagtgcgatcagcatctccctgacaatcttgcaggccacggccgtggatgcaccggatacgtccagcatcggagccagttcattgacatcacagccggctatctttgcattcttgcagaccagcgtcacggcgctgcgaagctcgtcaaaactcacgccgcccggttccggcgttcccgtacccggaaagactgaggtgtccagcacatccaggtcaacggtcagatagaccggctttccctgcagtgcccggagcgcctccataagactctcctgcgccagattaaagcggtgggtatatacgtgttcccgcccccagctccactcctccctgtctccggagcggatgccgaactgatatatgcggccgtcgcccaaaagctcatggcaccttcggatcacgcaggcatgggacagcttcgcacccaggtaatcatccctcagatcggcgtgggcatcgaaatgtatgatatggagatccggatatttctccctcacggccctgacggccgccagagttaccagatgctccccgccaatcataaacggcacttttccatcttttactatctctcccgccctcatttccaggtcggacagggctgcctccgcactgccgaagcacagctccaaatctccgctgtcaaatacggcgcagtcaagcaggtctttatcctggtatggggaatagctctccagaccgtaagactccgagcgcaccgccctggaaccgaacctggctccgggccggtaggaggtggtggaatcaaacggtgcgccgtataaaacgatatccgcctcctcatacggtgcgtcacaagccagaaaattctcaatatttgccttcaacatcttctaacatctcctctacgtaagcgggcaggtaaaatgcgcccttatgaagtgtggtggtatagtatcggcaggataagccccgcatgttccacctggtttcattcaaatccttaagcggatggtatttctttgatgcaaacccaaacagccagtgtcccgacggataagtcggaatatgggcctgatagacgcggctgatggggaaggattccacgatccgcttatgcgccctcttgcaggcctccgcatcggcgtcataaaacgggctttcatgctggttgaccatgattccgtcttctttcagagccttatagcagttaccgtaaaattccctggtaaacagtccctcccccggtccgaagggatcggtggagtccacaataatcaaatcgtactgattctcacaggagcggacaaatttcaggccgtcttcgtagtggatggtgagcctctcgtcatccaggcggcaggctgtcttcggcagatattttctgcacacctccaccaccaggggatcgatttccaccatgtcaatgtgttctatctcatggtaacgggtcagttcccggattactcctccgtccccgcgccaatcaccagcacctgttttaccgccggatggacagccagaggcacgtgtgtgatcatctcgtgatagataaattcatccttttccgtcagcatcatataaccgtccagcgtcagaaaccgtccaaattccggggaatcaaagacgtcaatccgctggaattcactcttgccgctgtagagctggcggtctacccggatggacagctttaccccggcgtgtgtttttcagaaaaccagaaattcatgttatactcctttcagtagagatttagttaagcaggtgaggacgccgccggaacggccggcggacggggtggcggggtgtgtatatgagtctttcgtcccgggggaagattatcgtggtttggggctgcgggcgaagatagtctcacgcgttaagtgcgggggcggaccttgtcgcggccactcagcgctaccgtgtgcgggaaaatacgatatgccatcaatgggcttttcaaaaaattgcggaagattttgatatcggcctgccggaaacacgtagtggcgcgacagggccctccccatttaaggttggagacaatcagcgaccggagcggaccatgtccggtgtgcgaaaacctccgcctgagtcttccgtccccggcaaaaacctgaacgggggaagtaggcggaatcaattctggaggggatatggaagcccatccgtgcttaatgaggtttctcacgaatttagcacggctatgcgcttcgaaaagtgcaaacggtccccgtaagaattcattcctgccggattcaccccctcacgacaacctccaaccggggacggaatactcatccagtccccctcaccacaccggacatagcccgttccggacgcgtcctccaaacctcagttaaatctccaatacattcaacctctcaattgcggcatcctccggccctgtcatcgaacatcccttatcctttgcatagcgtatgtagtcaataatctctgccgtgatccgttctcccggtgtcaggatcggaattccgggcggatagcacatgacgaattcactgcaaatgcgtccggccgtctcgccgatgggcagggattctttttccgcgtagaatgcctcctggggcgacaggactaccaccggatcgatataatcataatccatcaggctggatttatctcggctgaaccggcgccgtatctccgagagggcgcttacgagccgttccacctccctctgtctgtctccgatagaaaggtaggcgaggatatttcctagatcgccgaattcaatctggatatcgtactcatccctcagcagatcataaacctcgattcccgccaggccgatatccctcgtatggacagagagcttcgtcacatcgaaatcaaagatgctgtctccattgaccagttccctgctgtatgcgtaataaccgccgattttattaatctcattcctggcgtacccggccagctccgtcaccttcccaaacgcctcttttcccctgagggccagattccttctggaaatatccagactggacaaaagaaggtaggagccgctggtggtctgggtcaggttgataatctgtctcacatagcctgtggacatcgccgggcctgtaagcaggagggaactctgggtcaggctcccacccgatttatgcatcgatatggctgccatatcggctcctgccgccattgcggagacgggcagtccctccccgaaatagaagtgggttccgtgtgcctcgtctgccagacagagcatcccatgctcatgcgccagcctggcaatggagcgtaagtcggaacagattccatagtaagtcggattatttacaaagacggcctttgcatctggattttcctcgatggccttcttcacatcctctagcctcataccaagggggatgccaagcctcttgtcaccggccggattgacatagaccggaacggctccgcagagaaccagcgcccccataatactgcggtgggcattcctgggaagaatgattttctccccccgcttcacggctgccagcaccatgctctgcaccgccgaggtcgtacctcccaccatcaaaaacgcatgggctgcgccgaacgcctccgctgccagacgttccgcatccgcgataaccgacaccggatggcacaggttatcgagaggcttcatggagttgacatccatctgcatacacgtttccccgagaagagccgtcagctccggattccccctccctctcttatggcccggcacatcgaagggaaccaccctcattttctgaaatttctccagcgcctcgtagatgggcgccctttcctgggtaagtccggtcatagtaatcacctccctgattagtatatattgcgtccgctgaaaatctcgatcatttcccttctcaggctgtccataatggaaagcctcgtcctgggcggaagctcatagacatccgttttgaacagatagttctgcaaatcaatatccttcaccatcattttcgtatggaaaaggttggcctcatacacattgatatccaccacgtcataccgacgcagcgtctcctctgcgatataatcctgaatggatttgacccggtgatccataaaaagctttttgccgtccatggccctcgtaaatcccctgacacggtaatccattgttatgatatccgaatcaaaggaaccgatcagatagtccagggtggacagtggggtaatctcgccgcaggtagccacgtcgatatcgacacggaacgtggcaaggcaggtctccggatggtattccggataagtgtggaccgtcacatggctcttatctaaatgggccacctttgtctccccggccaccgggaccatggagccctccgcgatcaacagcgtcacggacgccccctgcggctcataatcctgctgggaaatgttaaggacggtggcgcctatcatatcagtcagcgtcgtaaggattccggtaagccggtccgaattatactgctcgtcgatataggcaatataatccttctgctctctgggcgttttggcataacagacgtcgtaaatattaaaactgagggcttttgtcaggttattaaacccgtataatttcaacttctgatccatcgtatctccttttccaatggtacaatgcaaaaagcggtaacagttcagccatgatgtattccgcgaggtgttttcgctgctttttgcgaaaatcccgagttaagcggcgcgacgcgatgaaaagtaaacttttcaccacaatcaacggcgtttttgccgtttccgtgcatcatttgctgcagtttggccgaaggctgaactgtaacaaaaagcgcaagtgatgtgtctgcatcacttgcgcaaaaataatccgatcgttctattctcctgcatccaacggataaacctcccgccggaaattctgttaccgcccttcccgggcgttatcacgaattaaggaaaactttgattttcagagtctatatagcaaatattttacttttaccactcttattgaccgtttcacaagttgatgtgcaccatcgcactggttgtaaagtaaccaacttataaaatttgagcttctaactcaatcaataaggcaacgaaagttgccgctcggcatttgacccggctgtccgtatggcctctacccgtctgcggcgggtggtcaagaatatttgcatggatgactcatctaaaaatcatcatttttccatgtcgcgagtatcatatcatttttagggtggtaaagtcaagaaaaatgtggaaaatttcttgaaaagggataacagtttggagatttagttaagcagatgaggacgccgccggaacggccagcggacggggtggtgggatggatatatgagtctttcgtcccgggggagtggcatcgctggctggagaaggagataccgtggttttgttttctctgggcggagccggagagaatgatatccggctggactgctttttcgagggatagctctaagacagagaaagacaaagcataccggggttccggacaaattcgccccgaactccggatgagttcgaagctcagttgtcccggattttgcccttgaagggccaaaatccgcccggcgcgctttgcctttctctgcctaagagctatcgactctcgggcgaacgtccttccggatatcattctctcctactccgccggaagatgtcgatagtatctccttctcccggaaggttatcgccgggacgaaaaactccgcccagggtatcggccccgtcccctggcctgcggctgctgattgtctcacgctttaagtgggggagaggcccttatcgcggccactcagtgattccgtgtgcgggaaatacgatatggcttcaatattcctttattaaagaattgctggaagattccacatccgcctgtcgggaacgtatagcggccgcgacagggccctccccatttaaggttggagacaatcagcgcccggaacggaccatgtccggtgtcaaaaacctccgcctgagtgttccgtcccggcgataacctgaccaggggaaggaggcggaatcaattctgcaggggaatatggaagcccatccgtgcttaatgaggtttctcacgaatttagcacggctatgcgcttcgaaaagtgcaaacggtccccgtaagaattcattccggccggattccccactcacgacaccctccaaccggggacggaagactcagccatccccctcaccacaccggacatggtccgtgccggacgcgtcctccaacctcagttaaatctccatatgctttagtaacagagacctgtctgaactgttaaaacagttcacctgcctatttgacaagtccgattccaacctgcatcacccctgccagcagcatcacagttatcgggttcatatgtctccaacgaagcagataaactgaaacagcgaatatcacaacggcctgcaccttcagattctggagcgccatcacgccctgctctccgaaaaaggccgtgattatgatggacaggcctgccgccccgatcagggagactacggccgggcggagtgagttaaggactccctgcagaagcgtcatcttcctgtatttcatgtaaatccaggcaatcgccgatacgataatgcaggagggcaggatgcagccgaaggtggcgcagagagcgccggaaaagccggcaatcttcagtcctacgaaggtggccgaattaattgcaatcggccccggcgtcatctgggaaatcgtgaccagatcggtgaactcaccaagcgaaagccagtggtgcagatccaccacctgcgcctgtatcaaaggcatggccgcatagccgccgccaaagctgaatgcaccgatttgaaggaagctcaaaaaaagctgaagataaatcatgatgtcttacctcccctctgggccagcagcgtcctgacggcgccgaggacaccgcaggccagtataatataaacggcgctgatattcagaaaatagacggcaatgaatgacagaaccataatcagaatggaaatatatttttttccccgtacgattccctcccccatatcatagacgactgacgcgatgacagctccaacgccggcctgcattccctctaacatcatggcaatgtaaagattctcccggaatgccgtatagaacagggatacgatagagagaatgacaaaaggcggagtcactgtacccagaatggacaccagaagcccgggaacgccggccagcttatacccaatgacaatcgctccgtttacggcaatcggccccggagcggattgggcgatagctaccagatccagcatctcctcctcatcaatccagtgatattcatccacgaatttctttttcatcagcgtgataatcacatatcctccaccgaaagtaaatgcgctcagataaagcgtggaaataaacagcttccatattactttccctcgttccattcagttctcctcctctttcactgcgccgcagacactttttgcttgcgtgtacagtaacttctgtacctcatttgcttgcattataaccgctcttgatctatttgtaaaatactattattatataatatagataattaattcattatgtattttcatatttcaaacgagaaaggacaggattatgacacttcgccacatccgtattttcgtcaccgtatatcaatgcgaaagtattacgaaagccgctgaaaaactgcatctggcccagccctctgtcagccttgccatcagtgaactggaagaatactatggactccgtctgttcgatcggatgtcgcgccggatttacgtaacggaagcaggccagcagttttatcactatgctcttcatatctcttctcttttcgatgaaatggaaaagggaatgaaaaaatccggctccacgggaacattgaaaatcggcgcgggcatcacgatcggaacgagccttctccccgaacttttaatccgcttccgtcagaagcacccggatttcaaaatttcggcattgataaaaaactattccgccattgaagaggcccttctttccaatgagatcgactttgcgctgatagaaggctctccttcctcgtctcagtttatcgagataccttttatgaaagaccgcctctgtcttgtctgcggcgcgtcacatccccttgctctgaaaaaatatgctctcccaggcgaactgttctcctacgattttctgatgcgcgagaccggaagtgctaccagtgaaatcgtaaaaagtctctgttcccttcacggcctgaaaatcaccccggcctgggagagcgccagcaatgaagcaatcatcgaagcgctcaaaaaaaacctggggattacaatcctccccaggctcattgtccggaacgctttaacagaaggaaccctgaaagaggttgtcctgaaagatatcaatctggaacgctgtttttcagttatctaccataaaaataaatatcttccggagctggcccggtcattcatcgaattctgtgttatgcagtacagctcttcttaatgcctgcagccttctgaatgtttcaatgcatttttatgcttcgccgctcgtttcttcgccgcctttattcagcttcggacttgcaataaacaacgccactccggctataaaaataaagatggaaataaactgggatgtggagaatgtccccacggagccgcggattaaatctcctctgaaatattcaagcacaaaccgccccgcactgtagcaaatcagatacagcgccgatacctggccgggtgcttttgctctcctggcaaaccaaagaagcacaatacagtgcaggaaattcagtccgcttgatataagctgggtcggaagcagcggcactccgttcggcgcgaacgctgaatttgtaaacacgatggatatcgggctgtccacctggagtccgtagcagcagccggccagataacagccaatccggccaagtccctgagccagggcaactgacggcataaccagatcaaagtacttaaaaaacggtaccttgtgtacacgggtaaacagaaatccgccgaatataccgccgataatcccgccgtaaacaacaaagccgtctcccaggtccaaaagcagtttcggattcgcgataatatcgtcaaaaattgtaacataatacaaaagctttgcgcagatcagcccggcaatgattgtccagccggcaagggaaataatcttatcgctgtcgagtccctgtttgctcgccctgtactccgtcataaaatatgcggccacaaagccgagtcctatcataaggccatatccatgtatcgtaaagccgccgattgtaagcaagtcgttcttcatgttgtcctccgttctgtgttgatgtatcggtgtttagtatatcttcttttctgccatcctgcaatggatatgcgtattttttcagagaaagtttataattttgtaaagccggcgtaacgcggccgggacggaagactccctacatcaactaaaccaaccctttcatcagctgcggcatctcctcccgctcgaactcacggatggaaatagcctttttattcggattggcaaagacaaacgttttatttacattctccacgtagttctggattttatcattggtagcgctgatgatggcctggaagcccagatcccggatcagttggatacagcttgccaccttttccgcatccattttagagaaggcctcgtctaaaaccacaagccggatggtagggctccgtctcagttttggcggcagcccgatccggtacgcctgggcaaagctggctaaaagcgccacatagagaggattctgcccctcgcctcctgaattcttttttatcattttgctcagctgcagcttcatgattccatcgtcatttttaataatctgctgcatgtcaaaggagagataggtacggtaatcggcatatttatccatattcctgcgggcctcttccatctcctccgccgaagcgttctccggcgggatgaagatattaatcagttcattaatctgctcaccatactggttctcatgctccattgtaaagaaattcatctggttttcaaaggtctggctgagtttagacggatttacctccagcgcttcatccataaacatgtcgtaaaaacggccgtcggctcccctgtttctgccgatgacaaactgatatttgtcctttccgaaattcaggctgctgataatccggttcagttcatcctttcgctgaaccgcctcgcggatggcgctgcggattttatacataaagtcgtctttaaaatgctccaccgccgtcttggcctgttctgccgccgcttccctgtaatgctcaaggttatcgcagctcagcgtatcgagcagcttgtcgtatgccgcattatcctttgcgctgggtgaaaagctcctgttcggataacgtttcaggtattcaagccggcggccgagcagctgttcaaacgcgcggtcccttgcttccgccgccgctgccgccctgcctttgaaataatcccccagtttgtcaagcctcggattttcacgtttggagagaaattcgtctaaccggtcctccagctcctgcacctttgtgaagctgcgctcccggtcggaaagctctccctgctgccatacggcctcttttttatatctctcgagttcatcccggctgcggtctatctgtctgcctgtctcgcggatctcctcctctttggcaaagcgcagggcctcgaccgcctcccgctctttctcccactcatcgatattctgttccttgagtttgagaagcttatcttccagccgctttttctccctggtcttctcctttacttgcctgatatcgaggagccattcaagataagtgtccgcactgctttccagcttctcaagccccaggagccggatgcattccttttgaagctcctcctgcggttttttctgtgcacggcactgttctatctcttcttccagcaggcggattcttttcttcacgctcgcctttccgatataagcccatttcgtataatgatccggattgatatactgcaggcggtaattgcggtaaagcatgcagtccggcgtaattcccgtcctgtttttccgaagttcctctatgccgcggcacttgatcaccttccccagcagcatatcaatgaagggccgaaggtaatcctcccgcacctccacctcctttgacaaggcattttcaaatataggcggagcggcttttgacgctttttccgtatccaggacagctacattccaatactccctgcggtccagctccccgtaaatctccattgccgtctttgcataagccggtgcaacgaccagagacagcttgctgcccgccagatagccttctacggcatttctccactcatcgttcctgatatcaagaaggtcggacaggacatggacctccaccgatcttttgcactcttccagaagccgccgtttaatatatgcccgtgcattctccaggtttttcggatatgccttgtttccggcctttaactggctaagctcctcacaggcctgtttttcccgctttgacagctcacggaggattgaaccggcctcctgtttctgtcttcccacatcctcccgcatctcctccacggatgccttcagccggataagcgcctccctgccgatggtacgggcctcaaattcctctatatcccagatggtctggttggatgtgacatcctcatcgacccacgccttcagcccttccgccgtcctctgccatttgtccgcgctttttgaaagatgttccagcagttcattgagattgaggagtttatccttcagctcatcgtatccggtggacgcaatctgccggagcagctcgtcgctccttaatttcaactgtgcagcctgactcaccacctgattttccaatacttcctgtttatccagatcggaggccgcctgtccgatacggtcggatatctcggacacctgaagacgaagattcattatttccatcttattcatgaaataggtattcgcccgaatctgctcctcctgggcctgtacctcacggtattgtgcggccagctctttgagttcctctatttcccggcaggtatcttctattttctgtctcattctgccgtactgcatcacgctttcctgcatatcctcaatatggatatcctgctccatgcagatgtattcttttacaaaatcctccagtttgatattcatcctgaatggtatcgccctcttaaaaagcagggggaatttttcctgatcaaggccgcccagatatacatcgtagagaagcctgcggaaccgctcattatgggaggtataaaaacactcttcttttccataggaacgcagcagctcctcctccacctccgcgatggtcatggcgcgcccctctgtcctgtagttgttctcccacagaggccctttatgccagaaaaactttctcgagatttcattggaagccgtctccacgtcaaatacaatgccgacacactggcattcctccgtgtccgtctgtttcagctccaaaacgatggtcgtagagaaatttctgtttctcagataggcaaattcattattttcccctatgttcaccatgcctctcagatactcaatcaggctgcggtcggaatcatccgcggccgctttattgaaaaagcctcttccgtccgtgttggcatacagaactatctgcatcgcatcaatcacagtcgattttccgctgccggagtgcccggtgaaaaagttgatttcttcgctgaaggaaagagtcttccggctgatataatgccagttattcaggcagatgcgggaaagtgccacaaagcgctccctgtcagtcttcgtctgttgtatcatcatcgtcctcctcaatctccggttccaaagcggaattaatctcccgctgcggcgtccctgcctgcagggcctcgtcctccctgaatgattccagcagttccctgacatcgtccccagcagcaccacattgatacagggataaacgatcaggcggctgttcccgttcaggtcgtccagaagctcaagcggttcgatcacctgatattttttcagaagagtcaccgctctcctgatatcggtcggcgacggctgtttcttaaaaagccggtagcttccgagcttttcatgcatctcgccaagcgtcgtatacacattgacgctggttgatacgctttccatctgttcatcataaatcagcttcagtatcagaagatacagggtggcaagcctgggcagcttatcccccacaagcgtctctccctgaatataaatgacaccaagctggctgttctcataaaccgatatgccgctgatggaaaaataagtgcgtataaactccaggtgtttattgcagatacggaattcccggttatactggaaccgtccggtccgtctgtcatatttccgctcgagaataaaggtctgacggagcaaaaggcggattgagtctgtaatctccctctgttcttctcccatcagaccgtcaaaatatggaatatctgtcattcgttcctccttacaaataccagcttcggatagcggtatctgccgttatctatcatttccgcctcttcctcctccacaaggtaccggcttttctgtctcgtggaatagtcataggcaaggatcagtttctcaaattcctcatcacaggatacggtgtccgcatctgcctccattttccccgatacggctctctgcgtgataaaattctctatatcgctgcggctgtaacggttcttcacccggttcaagttgagaatttcctctgtggtcagctccttatcctcctcgtccggctccagattctttgagaaatcggccttaacctttctgcgcttgtatagggatgcctccgacaggatattcatctgggacagattcatccgttttcctgtctccgtgagcatgttctcctgctccccgtcatccgccaggcggttcagcagtctgataatcagcccctttgtattgtcctcctggttcagaaggtaattcaaccgcgtcaccgtggcgcggacatacctggaatgctctttgtccatattggaaatcctgtgttcaatatcatcaaaaccgcgttcaatctggcttagcttttcaaggatatcctccatcatccgcgtctcggcggccttctgttcttcctctgccgtcctgccggcggataacaggccgtatgaatctgcggcgctctttctgacaagagcctccagccactgctcatcatccctcatctccccgatccagtgcttaatatcggttttatagagatagaaattatcggatgtcttcaaaatatggtacttcttcctgacaatttcttccacataaccttccaggtgatctttcagaagatttgcatagtttttctgctgcagcaggccggcaaaaaatttatccatattgtgcagcatgtcctgaagcgtcttattcagctttttcgtgttgaccagcgccgtgccgagaaggctcagcccggctcttctgtcatttttcagggaaaacagaattgcatagatattctgaatatagatctgggtttcgtcttcctcatcgctgtggagtctgcgaaacgcttccagcatgacagccgcatagtcgggtatgactatattggccgtcatggatgcgtaatcatcgactttcctgagccatccggcccgcaaaagccatcccagcaccctggttgccggaggttccagcgtatccagctcgtcctccagttcatcctgccagataacgtattttttccgggcaaaatgctctcccagaatccggatgcacgcctccctgcttaaaaaataattgctgtattcgtattcttcattgatttttagtaatgcttctatatagacgggccggttaacggagcggaataagctccaaaaccggtccggtatttcattcatcagtctcatcctttgcctccacggcccttctgaaaagcgcctgaccgttttttctacccatccaatgatttaagcgctgaaataagcatggtcagatccagcggctttacaagatatccgttcattcctgcatctaatgcttccatcctgtcctcatcaaaagcattggccgtcatagccagaatcggtaccgtacgggcatcgcttctatccatggcacgaatggctctggtggcctctaaaccgttcatctcaggcattctgatatccataagaacagcaaagaagctgccctcaggagatacttcaaaggtattcaccgcggcccgtccgtccttcgccgtcacaatgcagagtccatgcatttccagcagcgatttggcaatttccatattcagctcgttatcttccaccaaaagaacctttttccccaggaaagcgctctctacggcctgctgtttcagctcaacactgtttctgcctctgaatttcgtaaacgtctcatagaccgaagcgcgaaacagcggtttggaaataaagtagtcagcgccggcagccctggcctccgcctcaatactgctccagtcataggctgaaataataataatcatcgtatccgggcctgtgagctgcctgatacggcgtaccgtctcaatcccgtccatctccggcattctccagtcaatcatcgccacgtcaaacagccagccttcttccagcgctttctttacttccgctacagctttgatgccggaattgacaaaaacagttcccgccccgattccttcgagaatcccggctgcctgctctcctatgtactcgtcgtcatctgcaataagaaccttcatattattcagcagctgactggtcttgcgttctttttcccgctctccgtcatcactgagcagcccgaacggcagccggaccgtaaaacggctcccatgtcctttcctgctctcggcttttatgtcaccgcccatcaggttgacaagattgtatacaatagataatcccagcccgcttccaatcttattccttgcactgtccagcgtctcctgctcaaacggctggtaaagcttctccagaaattcaggtgtcatgccgattcccgtatcactgacagagattttaaaaatggcaaacccgttaatccgtttttcttcctctatctcggttcgtatctttcctccgggagctgtgaatttcactgcattggaaagaagattcatcaatatctgcttcagcctcagggaatcaccgatgtaacagcgttccagcggatccttatgatggatctcgtagtcaattccgcgttccagggattgagggaatataatcgaattcaattcggcaatcatttcaataaaatcaaagggctcattggtaagagtcatcttccctgtctctatcttggacatatccaggatatcgttgatcagggacagcagatatctggatgaggtatcgattttgtcaaagcagtccctgacacggaccgggtcttccattttcagtttaccaatcgtactcattccaattattgcattcatcggagttctgatatcgtggctcattctggaaaggaagtcggacttggcgctgttagctgcttttgccgccgccagggcgtctctaagaagctgttcctgcttcgccatctccgccctctgggcatccaatacctttatcattcgtatggcaatcatatcgccattaaccggattatcaacgtagataagatgggatgaaatccagtgatactcttcatccatccctttctgcctgtattccaggtaaatctcccgttccccttcggcaaacttcttcattatcgtttctctggaaaacaggctggaatagtcttcgcggtaagcggaatagactctttcggcaccgtaccggaacaattcatcatagcttccgctgcggtcgatcgtataagagtcctgctcttccacaaaacactcatagtaatcctgggtcagattaattctcataatcagcggataggccgtacagatagcggcccggagggactgattctcgatcagtctctgccgttcgctctcaatttcgattcgccgcacttccgtgatatcggtaaatactgcctgtatgacttcctctccgtccgcattcacaatccttcccatcgttacattgacccagacgggtttcccatccttcttttggctctccctcgtataggatgctacatcgccccacaaagtcagggattcctcagtctttaacacccagtccatatcttttccgagtaccatctgaaacggagttatgacctcgctgcggtactctgcttccgatgcgaagccataaaattcccatgccatccggttgacactcacgagcctgtgattgggatccgtcgtaaactgaagaatgccgcagggaaccgtattgtaaagctgggtcagaaacttcgcagtccgttccacctctcttcccgctttctcaatcttcagttcattctgtttcttttccgtaatgtctgtgataaaactgtataaaatttcttcgttctggaacagaactttcttaccgacatcggctacccagataatgctcccattcttccttatggcgcggtattccaggtaataggactcgccgctcgccagttcgtctccggttacccgccttacactttcaaaatcttcaggcaaaatgaagttcttacagcaattcccggttctgtccgcatattccgtctgactgctgtagcccaggagctggcacaggctcggactgatccatctggtggtatataattcatcatttttgcagatctgcatgccgccgggcagctgtgacagcatcagttcaatctgctgctctctctggcccagcatttcctggagctgttcgtaggaagccttcgcagctctcaccggaaacaattcatcatcctttacatcgtcgtaggatacggaatgatgaagatgtgccagccgaagttcgccgttctccctccggtaaatgaaggtagccctctggtgcgccttcatatacagcccggagccttccaccgattccgcccatcccgtactctcgcaaaaatagcagttctccgccacttccctcacggtgtaggtctcatcatataattcacagggaatcatatcatcctttcccgcacgaaatgcctccgccacagcatccttcccttcggccctcatcatctcgccggccccaatccacacaatatcctgtgtaaatttggagatcaggtattccatatctgattcacaaaaatatctatgcagcaattctttcgataaatcccttacttctctcaggatctcttctctcatatgattccccttttcaatgaacagcagcgggccggtttccggcacctgccacgccctgttttacatcttttccatcaaacccagcccgtctgatatactcatccgcatatttttatctaatgttaaattataacagaattcatttctcaggtaaaggtgttatgctccgtaagttttgactggctttttgtaattgaggttaggggactagctgagtattgactttattccacttattgaatataataaaagtataatatataatggaggtatgccaatgtcattaaaacatggtttactcggtcttttgaattacgggaatatgacgggatatgatatcgacagaacattcaaagattcactttttctattctggcaggcgcagacaagccaaatttaccgggagttaaacacaatggaaaagctgggatggcttacatcagaaattgtaatacagacagataagccaaacaaaaagctctattctatcaccggcgcaggcaaacaggaactgagcaactggcttaatgaaaatagtttagacaatgagtttcgatcacgcagcacttttttaatgaaactcttcttttcaggagagagaagcatttcggaaaatatcgcgatgctgaaggactataaagccagatgcctgaatgaactggaggaactggataaagcaatgggcaatatagaacggtacaggcagatcgcagaggtaaatcaggattctgtatactggcagctcaccgcccgttttggaacactgcatatcaaagcctgccatgacttcgcagaagaggcgattaaaaccttggagggtttacaatgaacatcctcgtaataaatggcagtccaaaatcaaaaaacagcaatacctatcaaattacggccgcatttttagacgggatgaattccgtccggaatcattcggttgaattaatcgacattagccaatccatgatagaacactgcctcggctgctatgcctgttggacgaaaacacccggacagtgccttatccgcgatgacatggcaggacatatagaaaaatatagaaacgctgatttgattatatggagcttcccgctttattattttggcatgccttcaaaaaccaaagcgtttcttgaccgtctgctgccaatcaatctcccggctatagatatccatgacgacgggacaaacggacacccttcacgatatgatttatctcatcagcgccatattttaatttccacttgcggcttcgcctcaataaaaggcaattacgacagtctgtttcagcaatttgaacttatgttccatgacaggctgactaaaatcatctgtccggagggtgagctgtttcgtgtacctgcattatcccggcgtattgatgaatatttatcccatgtaaaaaaagccggggaggaatatcaactgctgggccgtttttcacaggagacccaaaataaattaagcgaacttctgtttttgccggaagtttttatcgaaatggcaaacgccgattgggaaattgaacggataaataaagcttctgctcctgagagtcatgccgcgaaggacacgtcctatccgttcctgcggcagatggctgcactgtataatcccgatatgtacacaaaagatattgttttggaaatgtactttaccgatctggataaaacgtatcagcttttacttggcaaagaaaactgcacggtcaaaactgaagatttcaccccctgcaccaccagaatcgaaacgccatttcagatatggctcgaaatttcagaaggtaaaatagacggttcggaagccatgatgaaacggatgtataaggttttcggtgatctcaataccatgatgaagatggacgatttcttcagtccgggaaaacaggcgaaagccacaccggttatccggaaacagtcgaatatgcttctgcttttactcccttttattgcaatgtggactctaatgccttttaattatattcttggcggagcagcggggattttggcaggcggattcatatctattctgcacctctggttcaagcccacaccgtatgaacgaatcggcgctttttccgtcacattggccggactcatcgtgattgtcaccgggggtgcggactggcagttatcaatccccttttttgcatcgggattgctctggctggcttcctcatttttaaggataccggtcacggcatattattcctgcaacgattacggcggtgaaaaagcctgggaaattccacttttcatccggacaaaccgcattttaaccgtaatgtggagtatcgcttatctgctatggggcgttgttgagctgttcgccgttaatacgcagaaaatgctgatatttgaaatttccgtttggatcgtcacaggattacttggtttatttacggcttggttttcaaaatggtatcccgctaaaatagccggaggaaacggacacacttacatgtgacccggttgtcagatgaaacgtaactgttcagacagcaatgtcatttagttaacactatggagatttagttaagcaggtgaggacgccgccggtacggccagcggacggggtggttgggggtgtatatgagtctttcgtcccgggggtttggcatcgctggatggagaaggagatactgtggttttgttttcgcagggcggagccggagagaatgatatccggctggactgcttcttcgagggatagctctaagacagagggagacaaagcccccggggttacggacaaattcgctccgaactccgaatgagttcgaagctcaagttgtcccggattttgcccttgtagggctaaaatccgcccggtgcgctttgtctccctctgcctaagagctatcatctctcgggcgaacgtccttccggatatcattctctccttctccgccggaagatgtcggcagtatctccttctcccggaaggttttcgccggaacgaaagactccgccgggtgtatcggccccgtccgctggcctgcggccgctgatagtctcacgcattaagtgcgggggcggaccttgtcgaggccactcagtgcttccgtgtgcgggaaatacgatatgccttcaaggcgcccttatgaaagaattgcgtaaggtttgatatcagccttccggaaacacgtagtggtcgcgacagggtcctccccatttaaggttagagacaatcagcgcccggaacggaccatgtccggtgtccgcgaaaacctccgcctgagtcttccgtccccggcaaaaacctgaacgggggaagtaggcggaatcaattctggaggggatatggaagcccatccgtgcttaatgaggtttctcacgaatttagcacggctatgcgcttcgaaaagtgcaaacggtccccgtaagaattcattctgaccggattcccccctcacgacaaccttcaaccagggatggaagactcagccatccccctcaccacaccggacatggtccgttccggacgcgtcctccaaacctcagttaaatctccatgatgttggggtcagctaaatatctttgacaatttccgcttccgtgttataattgaaaaggaaaactgaaaactatctgctatgtcggttatacggtggatttatcaaagtgaacggcatagcataatacaaaagggtggaaccgcgagccgacatgcccgccccttgcagcgattttactgcaggaggcgtttttttatttaacagggaagtccggctgttaaataaaaaccgctccgcgggattccatcgtgtttcagcaggtttatatatgaaataaatgatatatcaattgcttagacggcaaaatacaaagaaggagacaaatcatgattattactttgaaggacggttcccagagagaatacacagaaccaaaatccataatcgatatcgcttttggtatcagtgaaggcctcgcacgggcggcctgtgcaggagaactggacggccgtaccgttgacttaagaactgttgtggaaaaagacagctctttgaatattctgacggcaagggatccggagggcctctccgccatgcgtcacacctgttcccatgttctggcggaagcagtgaaacgtatgcgcccgcaggctaagctgaccatcggtccgtcgattgaaaacggtttttactatgacttcgatacggagccgtttacaagagaggatctggacaacctggaaaaagagatgaaaaaaatcatcaaagaaggccagaagcttgaaaaattcaccctcaccagggaggccgccatccgcctcatggaggaaagggatgaaccgtataaagtggaattgattcaggagcttcctgagaatgaagaaatttcattctacaggcagggcggcgatttcaccgatctctgcgcgggcccgcatctgatgagtacaaaaccgattaaggcattcaagcttatctcctcctcgatggcttactggagaggtgattcgagcaaggcgcagcttcagagaatttatggaactgcttttgcatccaaagaggagctgaacgcttatctggagcatctggaagatattaaaaaacgcgaccataataagctgggccgtgaaatgcgcttatttacaaccgttgacgtgatcggtcagggcctgccccttctgatgcctaacggtgtgaaaatcgtccagcgtcttcagcgctgggttgaggatctggaggataatgagtgggggtatatccgtaccaagacacctctcatggccaaatcagatttatataagatttccggacattgggatcactataaagacggaatgtttgtcctcggtgatgaagaaaccgacaaagaggtttttgcgctccggccgatgacctgtcccttccagtattatgtttataaaaatgaccagcactcctaccgggaactccccctgcgctacagcgaaacttccaccctgttccgcaacgaggattccggagagatgcacggcctgacccgcgtccgccagtttaccatctccgagggccatctgattatccgtcccgaccaggtggaagaggaactggcaggctgcctggatctggccgttcactgcctgaccacgctgggccttcaggacgatgtaacctaccgtttatccaaatgggatccggataaccgcgaaaagtatctgggcgatgaggaatattgggaaaaaacccagggcaaaatccgtgacctgctggttgagaagaatgttccgtttacagaagccgacggggaagccgctttctacggaccgaaaattgatatccaggcaaaaaatgtgtacggtaaagaagataccatgattaccattcagctggactgcgctatcgcggagaattttgacatgtattttattgaccagaacggtgataaggtacgtccttatgttatccacagaacctccatgggctgctatgagaggacgctggcatggcttatcgaaaagtatgcaggcaaattcccgacctggctctgtccggaacaggtcagagtccttcctatctccgataaatatgagtcctatgccggagaagtggcaaaagaattaaagaaaaacggcgttttctgttccgttgataaccgttcggaaaagattggttataagatccgcgagacgaggcttgataagattccttatatgctggtagtcggacagcaggaggaggccgacaaggctgtttccgtcagaagccgctttgccggagatgagggcgtcaaacctctgggtgagtttattgaacagatttgcagggaaattcggacaaaagaaatccgcgtggaggtcgagggagaaaagtgataagctgaacgctccgcacatggctcaccgccttttataaataaaaaagctggtattaccgcactgttttaagccggtaataccagttttttatttatttatctcatgtccggcaaacaggggatcatcctgccagagaacggtccgtcctgccttttgggacgccggaaggtctatcagcctctggttcttcgagcctcggaaccggagggagatatcgtattcctcttccacaaatctgccgtccaccaggatatccagcagactgagcatctcttttgtcacttcacagaaggctctttggccctccgacaaatctgtttccagcgtataaccggtatagcaccatatatccttatcgggataaagtgttttgacctccttcaggaaagggagaagctctctctggttctccggttccatcggttctccgcctagaaggctcaggcctgcaatatacgaaggtttcaggctgtccagtatcttttgccgtatctccccggtaaaaggttcaccatagccgaaatcccatgcctcgctgttaaaacagcccggacagcggtgcctgcagcctgacacaaacagactggtcctcacgccggtgccgttggcgatatcacagtatttaatattggcataattcatgattgcctcctataaatgcagcaccctgtcacggatttcctcggtgcggccctgattccagtactgtgtcccgatatagccgcaggtacgccttgccacattcatcttgttctgatcgcggttcttacagttcgggcattcccagacaagctttccgtcctcttcgacaatcctgatttcgccgtcataaccgcattcctggcagtaatcggacttggtattcagttcggcatacataatattgtcatagataaactgcagcacgctgattacggcttccagattatcctgcatatcgggaacttccacataactgatggctccgcccggcgaaagtttttggaactggctctcaaactgcagttttgtaaatgcatcaatctcctccgacacatggacatggtagctgttagtaatatagcctttatccgtgatcccctctatcatgccgaaacgtttctgaaggcatttggaaaatttgtaggtcgttgattcaagcggtgtcccatacagactgaaatcaatattatgctctgctttccattttgcgcaggcatcattcatatgctgcatcacctgcattgcaaacggcgtaacagacggatcggtatgggattttccggtcatatatttgcagcactcgtaaagtcctgcgtagccaaggctgatggtggaatatccgccgtagagaagcttgtcaatcacctctcccttttcaagtcttgccagggcgccatgctgccagagaatcggagccgcgtcggacaaggttcctttcagacggttgtgcctgcataacagggcctcatggcagagttccaggcgctcatcaaacagtttccagaatttatcgaaatcgccttcgctagacagggccagatccaccaggttgattgtcacgactccctgattaaatctgccgtaatatttcgcttttcccgtctccggatccacatacggggtcaggaagcttcggcagcccatgcaggtatagcaatggccttcaccgttcttatccactttgctctccatcatgatcttctcgctgatgtaatcaggcaccattctcttagccgtacatttggccgcaagcttcgtcaggtagaaatacggcgtaccttctgtcaggttatcctcctccagcacgtaaatcagcttcgggaatgccggtgtcacccagactccctcctcattcttcaccccctggtagcgctgaagcagtgtctcctcgataatcatcgccagatcctctttctcctgcctgttccgcgcttcattgaggtacataaacacagttacaaaaggagcctgtccgttggttgtcatcagtgtcacaacctgatactggatagtctgaacgccgcggctgatctcttctttcagacgcttattcaccatttccgtaatctgttcctgtgttgcgctgattccgaggcccctcatctcctcctcaacactctggcggattttccgccggctcacatccacaaagggagccagatgggtcaggctgatgctctgtcctccgtactggctgctggcaacctgggcgataatctgagtggcgatgttacaggcagttgaaaagctgtggggcttgtcgattcccgttccgctgatcactgttccgttctgcagcatatcctccaggttgacgagatcgcagttatgcatgtgctgggcaaaataatctgaatcgtggaaatggataattcccgcttcatgtgcctccacaacctcctgcggcaaaagaagacgcgtcgtcaggtccttgcttacctctccggccatataatcgcgctgtacgctgtttacagtcggattcttgttggaattctcctgcttcacatcctcgttattacactcaatcaggcttaaaatcttatcgtcggttgtattgctggagcgcttcagcgttctgatatatcggtatgtaatgtactttctggctacttcaaacgcctgctgctccataatctgattctccaccaaatcctggatttcctctacattcatcgcatgcggcctagtgctgcacacctcttccacctgtgcggctatcgcattgatctgggctttgctcagcttctgattagcctggacaacttcattcgccctgcttactgccatcataatctttgatatgtcaaagactgcttccgaaccgtttcgtttgataatcttcataccccaaacttcctcctgtgactcttactatatattgtggttcatttcaatcgggcgcctggcccggtactgttaattgatgccttattagtataagacaggacacggaggctgtcaactgcaaaataccatatattagctcattttttatttaacaatacaatatatagtgtttcatctctgatttcttccatgtcccccaatatatccacaggctggaaagcccctccattcaaggaaaaaaaggcttttggcacatacggcgcactgtttttctctcctgcgcttttatgattattttccataaattcccatccatattcccgttcccggacaaaaacacagccgcccaaaacgagcggctgctgcttctttttatctgtttatgtattggattgcaaggcatcgcgggcctccctgggttacaaatgccgggcccagttccagaatcagaatctcaagctccggaaaaatctccgccatgcgtcttttgacagccgccgcatcctccggggcgcctgcatgggacagaaacatcaagtgatttttcccgagttctttcttcttaagatggccgataatacagtccaccgctgccgtcatcgtccgtttaacaccgaacttatccagcttcctgccgtcctccgtcagctttaccaccggctttaacttgagcagtgagccaatggccgcggcaaccggagtcagccttcctcctctttttaagaaagaaaaatcctgaggaatcaggaacgattcggtattgcgggccgcttcctcaagccacttcagtatctcatgcttctccctgccctctccggccattctgtgggcctgatccaccatataacggtgcggaccgcacaaggtcctgctgttaaatacagtgatatcctccttattcttagccattgccctggcgctgcatgcgctctcatatgttcccgacaggccgtcggccatagagatgttgataatcggctccccccggtgtttctcataagtatccagcacctcgccaataggcggctgtgatgaggtgggtatctgcccctcatcgatccgcttataaaactgcggcatatccatctgcaaatcccgcccgtggcagtccccgatactgacgctgagcggcacagagtcaatccccgtatctctcccctcctccaccgtatacagtgatgaggagtccgttataatcctgaccatgaaaagtccccctgaccgtatggctgatatcctcataaatccaaccatacatagttatcgttactatgtattaaagtttatagtatgatatctttgcagtcaagtcttttcgccttttttccacatttttctacatttttcgcgcatgcgaccgtatcggtatcaccgtattatctcttagtatccaggctcaaaaaccgcattgtcttccagaccgatatcagaagattcctcccggtcaaacaccagattttccccttctagttcaaacacgtagaccgcgtccgcccctgccgcttcatcgtgattttgtcatccgccctctcatatgtccctgttggaacggaactcataaggatggagtactggaagataaagctgccgtcctcatccagaagaacgtatggtgcaaccgcctcctccgatttgacgaatatatactttccctccagcgaccccggattcggcctgtaaaagtgaaggtattcgctgtagatattatgtccgctctccgcaggctgtccgtcgacggtaatttttattgcatatgcatcgaatgctttgagaaatgtattgacaacgcctcccatatagaaatactctcccgatgtgcccattcggttcagttttccaaggaactcctggttgaaatccaggtcaatataagtcattccctctttttgagtcagctccatggaatttaccttcacgcctttttcaaggacaccggcttctatcagcttcccagccaggttctccgccgtaatttccgcaaggcggacttcctccgtcagcatcctctccaccgtatcattcccgcggtaaatggtcaccgggtttccagcctgctcctgcgtctcctgatccgtctcctctgcagcggcttcatcctttatttctgcgctctcttccgcttccgcagccgcggcgctgctctccaaactgggctcctgtccgctttctcctcctgcacacgctgccagaatcagggacaatgaagcgatggcaacggcggtgagaaaccgttttcctgtgtttccttttctcataaaaatcctcctgtgatacgcagataaacaattacttacagcctcattgtaccacaggagtgatttgaatttattggggattctattacgcattcttacaatattataaatatatcagctcttccccttatctctgccggttcgtcggggaaccgattaaaaagccgacgcatccggaaacgaagtcacggaactgggcaacggtggctgtcgcagaaggcgaagcttcaatcccctctccccagccgcccgcgtttctcagcagaatcagggtaaacaggcaaaacaggcctaccgccgccgcaatcagaatctgaagacggcctgattcaacaggatgttcttccttattctcttcccctttctccgcagcaagctccttttccgtgaaaacgccttccacactctgctccctcagtcctccgtctcccatccgtgccgtttcctgctgtcctgagccggatgcaccgttccggataaaattggcgcttaaaaaatatccgaaaattgcggcggaggatgttcttataattacatcgatttcatttgcctgcgccgtgttacccggaaatcccagcagggtacaggcggactgaatcagcaggattgtcataaacagaatcaggcatttatcaaccagatgtattccggcaagctccggccgtatccagctacacttaaaaattcgctgcttcacgcttctttactcctttagcttattggcggattatcagccgaaaaaccggactgtgacatttagttctcttctgccgtgagttatccggtaatttcaagtatgtccgcctcttatatgatatgtctgccagctgtgtttgcttccggccgctctaacctgaccggccgctaatacgaaaaaccggatagcagattctgcagtccggtttttaatcttttacctgtcttttttgtatttttccggttccgcttcagatccggtttctattttgcaataagtctctacccctgagccgccagcacgccgtcctccccaacatacttgccgtctggcgtcaccgagttcgtcagcatttctccgttctcattcaggaagtaccactgctccttccaggagacccatcccgtctttctgtagccgttttcatcgaagaaataccattttccatcaatctgctgccagttgtttttcacatagctcccatcggaattacagtaccaccagccgacggcatcatttttccaggttccggcagccggcccgctgccgctttgtttgtaagctgctgcagtctggatttctgcggctttttctgcggtaacttcaaatatatcagattcctgccactcgccttttctggaagaattatacagtccacgcacttcgaaccggtaggaaccggcgctgtctatatactttgaaaaatcgtaatgtgtctcttttaccgggcggattgtcgtaacaaacttttcattgcggtaaaggcgcagctcataataagcggcatcctcactgtccccccactctccgactgcgctgaattcattccactccgcatcctccgtgtccagatcgtagtcattgtcgtctgccttaagcgcatccagggtgatggtgacaatcagttcctcatcactctttcgtctcacggaagttacatcgccgccggaacccgtcagctttatttttctcttggtaaatcccgatttaaaataataatcacgttccgcctccagactcacctgaaccttcggcttatctttatgcttccattccccattcggctcattggtgacatccacgttggacacatagcattcgtcggaatccgtcgtcaccgaaacgtcggagcccgtatctctcacctcaatcgccgactccacatcaagcgacacttcctcaaccggagtccggtcctcctctgccagcgccggaaacgggcctgatatcgccatgccggccgccgccagagccaggacccaggtcctgattgattttatgtcggttcctttactatttcttattgtattcctcatatctattcctcctgaaatcctgaagtttcttttgtttccagctgttatccgtaatttccggcagactgcatcaggcggccggttcctctgccgccgcgctgctctccacaggatacggctccgtcagacagtaatctgaaaccttccattcctccccctctttcttaagggtaagaagcagatagtacataaattccgaatctttctccttcacctcgcacttcaattccagctccccttgtatctcctccggcaaaaccttggatgcaatgaaatacgaatccattttgccataatccatcacagtattgatatcggtacgagcagcagcctccctgctcagatgtttcttcatccccttcagactgccagaagcccagtcatcgacaaagtcaaaggcagcatccataacctccatctccacattgcgtttgtactccggggatgacggaccggccggaatctcactgacacgtaccgcagtcccggaaccggatggaatatcatgcaccttttcctttccatatccttgtatacgccataaaacaaacaatatgagaaaaatagcaagtgcaaatacgatgcatttttcttttttccccatcctcattaccctttctccgcaaaaacctgccgcaattcaattatatggtaattttaccacattttcagacttctgtctcccttattcctctttcaatagatatgaattaattctcttgatttatcccggcatttgtgctaaaaacgatatagcaccattcatcattcacgaataaaaaggagaggatacaccatgagttttaaggaaataaaagccgaagatttacagttcaatccctttaccagaatcggttccgactggatgttaataacagccggtgacgagaaaaaattcaataccatgacggccagctggggcggcgccggcgtattctggggaagaatgtcgtgacctgctacatccgtccccagcgctacacaaaggaatttgtcgatgccaatgataccttcaccctttccttctacggcccggaatgtaaaaacgccctcaatctctgcggcactgtctccggcagggaccgcgacaaaatatcagaggcaggccttactccgtattttacggagggaaccgccgcatttgaggaagcaaatcttatctttgtctgcagaaaaatttatcaggacgatatgccctacgagaattttatcgccaaagaaaatgacgcaaaatactatccgaataaagattatcacacgatgtatatcgcagagattgtaaaaatccttgtggcagaatgacagcctgtactgaatacactgactgacggccgccccgtttcggcttgccaaggcaggtaatccgaaacggagcggccccaatggttaaagatacttcacccgttactttctgaatatatcgaccgcatggctagtactgcccgctaaatccccgcgttcgcacgttgcgaagtggtatctcaagtacagttcaaatgtatcttgatccatggcctcaaccgcttcccgtatcaatggggcgcagccgtctgccgcaacgtagtgaagccgggtcacgggaaataccgacatcaattcatcgatatcttctttgcggacgagttcaaacaaatcctttggctcagacctggcagcaaatgtccgggaatcaagaaggcccatcctgatgtattcagctacgtttatattgccccgtttaaacccttcatcgagcagacagccgtcggatatgacataggcggcaaaaatcactcccccctcctttgtcacccggattgcctcgcgcagagcctgttgtttatcctccttgcaatagaggtggtacagagggccaagcaggagcgttatatcatattgattgtccaaaaaagcgctgagatccatcgcatttccctgagtaatggtgacattttcgtctgcctgcatattctgtcggaaaatctctatgttatgcgctaccagctccacggcgtctacggtatatccacggcgggccagcgcatgggaatagcgcccggttccggcccccacttccagcacgcggcagcccggcctgagatatttttcaatgtagcgcatcgtagtgaggaactcaaccgaaccatgccgtaacgccagccggccgtcctcatcataatgattgtagaaatcagtgatatacctgttttctctcatatcgcgtcctcctgtcttagcggccgccgcacatcacgtgtcaaccggcagattccactccggttttacctgtcttacaaaagccgtcagtatattacccaccattttttcagcgctgtctctctcaaaccttaattttttcgttgcggccagcactgctatcccgtgcgtataaagaaataaatctaaaaatatgactttggcgtattccggttcgatgcctatgatttccgaaaaaatctccgcccttttttcgtttccgctatctttataaaaatcttttgcctcactcatttccaggtccatatcgttgataaacagcagtttaaataattgtgtttcttcctgggcaaattcaatgtaggaaagagggaggagcagacagggatttacctcttcaaatatccggtaatcctccacatatttctcatagtattcataggcaaatgtaagaaattgttgttttaattcatccatattttcataacaggtgaatagcggccgggtagaacaatgaagctttcctgcgatgctccgcgcatttacagtttcaaagcctgtctctctcgtgatatccatgacggtattcaatatcatttctctcgttattttcgctttaggcggcatatttttcacttcccctatttaaacgataacctgcacgctctgtgcacaggtcaccgttatcaatcatattatgcaacgtatgttatgcaacaattgttgcacattagtcctgttttgtcaagaaggaatttcagccgcagaaaagcaggccgcctgtgccacactcttccaagtgggcacaggcggcctgctttttagtctttatctgctgcttttatttctccggacgctttgaaaatattctgtcttctatatcatatattgtaatctgcttcaaccgtttccggcactcctgatccagggtatcataaatctccgtcatcacaccggccatccccgatgaaacgaggcagtcgcggtcaggatctccgcttttccatgatgcggctacaaatggagtatcaagggcgtccgctatcatctgcaaatccacttcccgggcctctctgtggaagaaatatcctccatcggccccctcctttgtcttaatcaagtctgctttcttaagtttcgccatcactttacggattctggccgcattggtgcatacattgtccgccagcccttcgctggaataataagttcccttatgtgatagaaacactaatgcatgcacggcaatcgtaaactcgcttgtcactttttcatccccttttccttactttcgttttccggccatcgtctggtctatgatgctcttcatcatatcttcgctgagctggccgctggcgtagccgaatacatttccgtcgcggtcaatcataaaggtcgtagggaaggagaagattccgtacgcgttaaatatctctcccgtcgtatccatcacgacaggatacgtatatccgttatcctccaggaattttttaatgccctcttcggactgttcgcttcccatattcggggccgctattcccaggacgatcagcgcatcgtcgccttccgtatcataggtatcatacagcttctggatatccggcatctcggcgcggcacggcgggcaccaggttgcccagaagttcaggaagaccgttttccctttgtaatcggacagcgtatgagtattgccatactgatcctttaatgtaaaatcgatggcaggcatcagagccggttctgtctctccggatgcgttttgttcggaaccgctttcattcggaccgctctctttagcggcgttctcaccggaacccggttcttctgctcccgatgcagaaccgctctctgctgtttctccgctgctctccatcccgtccttcgtttcttccttcgtctcttcctttgtctcatcgccgcttacaacaccggcgctgtacccgctgccgccggacggggaaattcttgaaaggtagcctgtcacggaattcatcttaccggtgaacataagaattcccataaataccatcaggattccgccgattctcaccgtatatttgacaacgttcatatgactcttgaaaaaatccagaagcgatgtcgtaaacaggccaactgcgaggaacggcagaacaaaaccggccgtatatacgccaatcagcacaaatcccatcgcctgggtgctggctgacgccgccatcagaaggacactggctaaagccgggcctacacagggcgtccaggcaaagctgaaggtaaagcccataacaagagctgtaaatggtgacatcgccagtgtatccagcttaaaggggagcctgcgctctctgccgagcagggaactggatccgaaaaagcccagctggtataatccgaacattacaaccaggatacctccgactcttgcaaacataagctggttatttttgaaaaagccgcccatggctgaaaatcccaatcccagaaggaagaatgcgaaactgactccgattacgaagcacagcgtatgcagcattaccttgcttcttttatagtaaatccttccgtcttcgccgcggcttcccgttcccccggacagatacccgatgtataacggtatcagcggcagcacgcagggagagaagaaactgatcaggccctgaaaaaacaccgtcagaaccggtacactgatatctagtgaaaaacccatatagtacactccttttatgttgtaaatttcaaatttagtctgttacggccggattacacggcaaataactcgttaagagattcggccatcgtcggatgggtgaaaatcatgtctctgagtacggtatagggaagttttgcatccattgccatcttaataatattaatcagctcataggattcttcgcagaacagatgcgctcccagtatcaggcccgtcttctcgtcaattactgccttcagcaggccgtccggctgctctaacaccttggatttgacaatctcagacgcggaaaccgttgcgatctttacctggtacccagcatcccttgcgtctttttcgctgagtcccactctggaaaatgccggggctaaaaatacgctgtacggtacggctcccctatctttcagtgtataactgccgtctccgagaatctttgatttgacgattctgctgtcatccagggaaatataggtgaactgaagtcctccggtgacatctcccatagcataaacatccggagccgtcgtcatcatcgaatcatccgtaattataccgcctctggcattcacttcgataccggccgcctccagattcagctcctttgtattcggcctgcgcccggttgcaatcagtaccgcatcggcctccagcttcctgaagccttccctgtcttcaaacacgacggcagccctgccttcagtctgttcaactgctttgactttgacaccggtcagtacatcgattcctctgcccgacagcgatttacggacagcaccggctatatcagcatcctctctcggaaggaaaacatccccatcctgaagtatggacaccttggaaccaaagcttgcataaatcgaagaaaactctacgccgatataaccgccgcctatgatgacaagattctttggcaattccttttgctcaaggagcgtctcgcttgtatagacataaggatttcccttcactccatcgataggcggaacgaaagccgatgaacccgtatcgataaaaatctgcttgcccgtaagctttaccgtcttcccgtcccgctccacttcaacatcatgagaggaaacaaacctggcggttccatccatcaccgtgatatttgggtgatttgttaatttctgataatttctttccctgagctttccggtcaggctgttcttatgttccaccgcctctttataggccctggctttatcctcaaagctgccgtctccggctgatataagtcctgcgcggtatacaagtgatttggtcggtacgcagcccacattggggcaggtgcctccgtacattttgttggaacgttcaatcagaaccgtcttctttcccgcatcgcccagcgctttcgccagtgtctttccgccttttccaaaaccgattatgattgcatcatatttttccgttatttcgactgatttcttctccatttctattcctccttgccggattgctttatatgtaattttatttgttacagttcttatttgtaactttatcagatacagttgtatttgtcaagaactttttgggaaatttgcgaaatgagatttaactgaggtttggaggacgcggccggtgtggtgaggaggtgggctggctgagacttccgtccccggttggaggttgttgtgagggggaatccggccggaatgaattgctgcggagaccgtttgcaatctttggagtgcgcagcggttctaagctcgtgaggaacctcgctaagcaccggcggactcccatgtcccctccgcaattgattccgcctacttccccgggtctggttttcgccggggacggaagactcaggcggaggttttcgcacaccggacgtagtccgttccggccgccggcgatataacctcacaaaaatgtatttctgtactcctgcctgacaggctccgggaccaggttgccccctgtcgcccaggcgatatggactgcccgggccatcttatcttccaggcagtgcaggcggagatattctttcgtctccttataacggttcagcataactggcccggcaaaagccgcgcaggcgcttggttccagaaatacttcctccgtatccagcagatctctgagatattcatagagatttgcatcagacacggtgaagattccgccaagcagcggctccatcatttttccgacaaagcctgaaggccttcccacagccagcccgtccgcatgagtaattccgctcaggccaatgtcccgtacggatatatcattatgcaggcccgacgccattcctgccagcatgcagggcgcctcaaccggctccacaaaaaagcagtgtacgctgtccccgaacacccgtttcaggccaaaagccacaccgccgggcgcccctccgacgccgcagggaatatagacaaacaaaggatgctccccgtccacaatgatttcctgcgccgccagctgggttttcagccgttttgccgccactgcgtatccgagaaacagattttcggaattttcgtcgtccacaaaatagctgtacggatcctgctccgacagtttcctgccgcttttgaccgcgccgctgtaatcagactcatattcgattaccgtcacgccgtggctgcgcagcagctccttcttccattccctggcgtcggccgacatgtggacgatgacctgataacccacggctgcgctcataatgccgatactcagccccagatttccggttgagccaacctggatcgtgtagcggctgaaaaatttcctgttttgatcatcagccagtacctcatagctgtctttcaaggtgataagaccatgctcgagggcaagatcctcggtatgctttaacacttcataaattccgcctctggccttgattgaaccggcgattggcagatggctgtccagcttcagatacagcctgccggaaagcttggccccatatttttcattgatgcgtccctgcatcttcggtaccggaacgagcgccgattcaatcattccatccgctgcgtccgtttcagggaaacagcgcttgataaatggggcaaaacgctgcagcctggcctctgcgtcatccacatccaccatggtcagcttgaccgcctgcgcttgctcttcctccgtctccgtccttccggcttccggattaatccatacgagttgttttcccgttgtaagtctcgataaatcgaaagcaggctttaattcctgccgttctatcagtaaaagtgcctccgtaagcgtcctcaccgttgtaacgccttgacagtgttttattcccttcctgtccagaaacaccggaagaatcccggcggataaggcgccttttacatccgactccggagaatccccgatgtgaaccacctcgtccctcgcacagccgctcacctggagagccagatcgaacagttccctgtgcggcttatatgcgcgcaccatttcgccgcagatgattcccgccggattaagccccttatcccgcatagattccttcacatagggcaggccattgttcgttatgatgtaaatcggcagactgcatttctcaaaaaattccgccgtatcaggaaaagccggtgcatacatccagaaccgcctgcaaagctcatggatttcttcgaaattctccttcaggtgaatctctttttcacatacttccagcgtcctgtccacgatctcatcctgagtcaggaatgaatcgccgctgcttgcggcttcaaagtatttaatcagtttccaccagtaagccagcatagattccatactgtcgatatcgctgtttttgtagcagcgcctcagcatctgcatggcatcagggccgccctcctcaatcatagtaccggtgtagtcaataaagactgctttcagcatggtatccttctccttctgactttatatttctgaatcttatatttctgaacttatataaaaagttcgttcttttttctgccggaacatgcttttttcatcttttgcgaagcggcaaacagcaccagcctgtttaaatctctggcatggcgcgggcagactgaaacgcaacgcatgcaggagatacatttctccttgtcaaccgatgacggtttctctgccggtatcgccccggccggacattctttcgcacacagaccgcagccggtacaggaattgtccgcttccggcttaaatggcacgccgccatactctctgtacggcctgtttccggggagtcccgggattctgcccgtctgttccccctgcaaaatgcctgccgcctcttcctgccctccggattccttttccagacgctctcttatccgggcggcaaaaccggcaagctctttttcatcctctgcgtccggcctgccttgaccgaactggtgcatgatggaatgctctgcaacagccgcgactgccgctttacagtcaaaaccggctaaaacaagagtatcctccagctccagcagcgtatcctcaaatgcacggttgccgtaaacagcggccagaatcgttttcgcatgaccgccctccatctctttcagccgttccaggaccagccccgggacacggccgccaaaagacggcgccgccacaatgcagatatcttccctggtgaaatgatactgtgaataatccgtcccggccggtgacaaatcaatctctttcatctcccagccgccgctttctctttcattgctcagggcgcggcttacaatatccgccaccttctttgttccgcccgtcgggctgaaatatattgtataaagtgtccttcttttctcaaatttcccggcaaggctctgcctgtgctcctcaaatgaatgtttctccatggaataccccctacggccaatatttattgaccattatatacttttatttccattcgttcaagtttagtattatcttcctctctgtcacttctgcccactgcgccgggccggatttgaaccagcacataaaattacgggatataactgtccaggacggctttcgctttgccaaccaccagcccgctgccgccttcattttttacatcttccaccatacttaccagcaggagcggtgtatttatgtttttatctgccgtatatacggcaaaccagccaagttccgttccgccagtatcctcctttgatgctttgatttcagcagtgccggtcttgccggccagtgtaatatcctgcctcatggctttatgtccggttccgtgcggtgaactgataactttgagcagtgcattttcgatggtttgagccgtttcggctgtgcaggcctgttcaatccaggcttcaggggacggctctgccctgtaaagaaggtatggttttaaaacggtaccgtggttggggaacatcgtgtataaagccgccagatgaacgggatttatcagtatctctccctgaccgtatccgctgtcggcaagctggatttccgactcaattttctccgtattggaatactgggcttcggccaccgctatctcaaatggtatcttctggttgaaccccagacggtcaagtccggccataaaatcctcggagccaatcttcagcgccgccttggcgaaatagatattatcggaataaatataagcattctccaggtttaccggactgtatccgtgtagtgtcgtcacataataaccgccccagccggcatccttctgccagcgcagtcccgcctgtgtctctccaaaattctcatccgggctgagagctccggtgttcaggccaataaccccggttatcggtttaaaggaagaacctggagcaaagcgctgccggaaacggttcagcattggtttccgttcgtcctcattcagcgccgcccatttttcctccgacatgccgtagataaagtcattgttgtcatagctgggggtattgaccagagccagaacttctcctgtaaacggattcatggccaccgtacagctctttcggtcctgatacgtgtcgtaaatcatttcctgaagacggctgtcgattgtcagcctgatatcctgaccgtcgattcttgtgactgacgccagaaccagcttttcccgcccctccgcagataaaatggatatacgcgtgccgttccttccctttaactccttttcaaacaggctttccatgccggttctcccgattacgctgtccgtcaggtagccctctccctgatgctcttccagatcctcggccgttacattctggacatatccaaccaaatgggcggccttctctccgagaggatagcttctgacaggcgtatccgtgatcatgacgcccggaatcgtcaggagctcatcctgcagcgccttattccggagattctcctcatcgccggatgcagtctgaagctttagttcatccacgcactttacagtctttatcggaaccagggaatcatccttcacccaaccggcagacagtttttttgtaatattctcaactgatataccgagaagctgtgaaagtctttgtaaatcttccccggaatacccggactcattccccggttcacggctcatcctgcccggtacaagaccgaccagggatgcagtcccctctcctgccagcagattgccgtttcggtccaggatacggccgcgcgtcgccttgtcagtgctcaccctcaccttgtcatccggtcctaactgaggaaagattaacctgtcgctccaggccagtttatattcaggctttcctttcgttccttcttcaccgggcacttcttcccgaaaaaccgcctggttaaaaaagcttatttctccggccagactgtccattgtggtttggtattctaccgtaccggtaccgtcttctttcagctcagtgccctttatttctatcctgacgccggacgcctcgatcccctcgtatatgttcttgtttctcttttcaaaatcttccaggctgatattcaggcggctttggttatccaacatcccgtacatcgccccataatcgccgtccgccatatactgcatatattccgtcagcagttcctccggagtcttcttctcctcctttatccgcctctgtgaataaaaccaaaatgcacctgcggctgcaatagccacgctgcacagcaatacggccggtatcagcaaaacggctcttgatcttcttctgcgcctcatacgctgctcctttcctgtgattgaactcaccttcgataaagactgcggcagaaactcgggctggcaatttatcttatatattcatcttcgtcatcaaccggccgccaggcctggccgaatttcacatcccggaataatgtcgccagccctgtaatctgcttaagacgcagaatctcatctctgtccatgcccagatgtttggatatccatgcatccgaacgtcccaattcatgtaattcttttacaatgttgctcatcaaatccacattgtgggttcccctggccctgttgtggcggattgtgctggccatccgcttatctagcggtttattaatgaccgatacaggcagcagcccctgctccctctcatatatgtccggatggttcagcatcacctgatagcggtggaagccgtcgataataagataaatatcctgtgcttttacataatagcagactacaggcatcgtataaccatcttctttaatgctttcatacaaaagacgcatttcgggaggcgctactttattaggattatacgtattcggctttactttttcaataggtactgcaattacatcataaaccgggcttcgataactcataattaaaatcctctatgctttcgtattttttcttaatcaggtctaaacgtttctgctgctggcgggtcataccaaaacccataaaacggcagatgtgatcatttttcaggatacagtaacacattcttttccagcttggtatatcctttgtcgtcttgatattgtccgtattatcaggtatcggtccgagaaagacaatgcgagattttttatttacggtatagttggaaacgccattgcgccttatcttatatccgttctccaccagctcctggatcgttttttcgtccagcccgcctcccgtctcatgccagaactggatcgaggtgttgaattttttaacatagttattgcgaagcctcttcggcagcgtgtccagcagaaaatgggtataagatttccatgtatgcccgggcggaagtgtaatagtacggtaccccattgccttggttcttccgtagatcgaagcaaaattagcgccctgcacacggccgatcagtttacaccaaatctcagggtcgatcacccggtacaggttgatcgcgtccttcgagtagtcgttaaaaggcgaagcgacccgcatctgtgataccttaagcccggctttatggtaaagatcataaagccggttgtaatcataggaaaacagataattggcatgccatacatcctttgcgctccagtcgtaaagcggcgaagcgcaccagacatttttgaactggttgctaatccagcactcgcctttatagccgtattttttatttaaaaatccgctgtacctttgcagggattcgtctgcccgtattccaagaaggctgaccgtcttcttgtcaccgtgtatctgccggtaccagcggccgaactgttttgccagatcctcctgatgcatgcggtacctgtatgtagtgataggattgtttgataaattgattacatattctttgtcgggcatttcgcggacccatagctcctgttttgtatcgtcccatggataccagtacatttcatagctgctcagggcagttctggtggccattggcaggcaaacccagtaaatctccgcctcgtcttttattcgctccagtgtccgctcaatatattcagtggttacggtatattgggcctcgaaatcctgatgaaatacgccgatcgtcttatccggataatatttctttttgtagtcaagaaccagatttaaaagcaggccgctgtccttacctccggaaaacgacactaaaatattgtcaaattcttcgaagataaaatggagacgctccatacatgcctcatagacatttttttccagatactctcttttcatttttccctcccttaaataatacgcagcaaactaccctgccggacaggaaacgccaaaaagcctggagaatctctgctcccggcttttggtccccaatactgaggatactgtataatcaccgccaaatctaatactccttttgtatcaaatattactgttccatttcataaatacaaaccaatatcttgcttcattataactgctacatcggaattttgtccagtcggtttttatcatgcagtcaggtgtcattgctctgtctttacggctatccaaaggaggaggaagagacaagttgtcaaaatcctttacccgctccctccctgcgcactttattgccatcttcatccttaaaacaagcaatggaggcattctgtatattcaaaaaagacagctatgctcgtcagaacacagctgtccataaaaatatctatttcatcaatttacgcttcatcaatcgccttgccgatatcatgcctcatatacttattatcaaattcaatccactccgtggcctgataagcattggctctggctgccttcaaatccttcccggttgccgtgactcccagcacgcggccgccatttgtcacgatattgccgtcagcgtcaaatttagaacctgcatggaaaacatagtaaccgtctttttccttgaaattttcaaggccctttatcttgaagcctttctcgtatttaaccggatagccgtcggaagccaggacgacacagacagccgcattgtcctcaaattccagttcaatctgatccagcgttccgtccacacaggcttcaaaaacatcgacaatatcattcttcatacgcggcagaaccacctgcgtctcaggatccccgaaccgggcattatattccagaactctggggcctttttccgtcagcatcagaccgaagaatatgattcccttaaaggttctcccctctgccttcattgcatcgaccgtagcctgatatacatatttgcggcagaattcatctacctcctgcgtatagaagggacttggggaaaatgttcccataccgcccgtattgagcccctgatctccgtcccctgcacgcttgtgatcctgagcggaggtcatgattttaatcgtgtttccgtctacaaaggagagtacggaaacctcccgaccggtcataaactcctcaatgaccatctggttcccagcggaaccaaacttcttatccatcataatttctttcacgccggcttccgcctcttcatgggtattgcagattaatacgccctttcccagagccaggccgtcggccttcaatacgataggcatctcagccgtctttaaatataaaagcgctttttccggatcgtcaaaattctcatatccggcagtcggaatattatatttcttcatcaagtctttggaaaatgctttggagccttccaaaatcgccgcatttttcctcgggccgaatactctcaggccttctgcctcaaacacatcgacaatgccgcctaccagcggatcatccatgccgataatagtcagatcaatggcatgctcctttgcaaaagccgccagcttatcaaattccatggccccgatatccacgcactccgcatactcggcaattcccgcattgccgggcgcacagtatatcttgtccgttttttcactctgggacaccttccaggcaatcgcatgctcgcgtccgccgcttccaacgattaaaattttcattatctcatgtctccttatgttatcagcaacatttcagacagcatgaactgttactgcatccggcctaactaaatcgctgcgcgttgagccgaatgattgctgccaccgctttttcacacggtcagcacagcaagtatgcagacctgtctgaacggctgctgttatcgaacttctgctatcatattgattgcctgcggaagaattacccactccgcctcctccatgacgcggcgctggagaatctccggcgtgtcgcctggtttcacctcaactgccttctgaagcaggattgggcctgtatccgttccttcgtctacataatgaaccgttgccccgtcacttttactccccgctctaaagccgcctcatgaaccttcagtccataaaaaccgactccgcaaaacgacggaatcagggacggatggatattgattatcctgtttttatatgctgcaatcatctcttccggtatctttacaaggaaaccggccagcacgaccagatccaccttgcaggcattcaccgtatcgagaagcgctttgttaaactcttctctgctgccgtacgctccgggtgtcactacaaatgccgggatgttatgatccttagccctctggatggcataggcattcgcattattgctgattacagccgtcacctcggcgcccttaataccgcctccgtcaatggcatccaggattgcctgcaggttggttcccccgccggaaaccagcacacctactctcagcataaagtcactcccttatctcccgcttcgatggagccgacaacatacggaatctcttcagccgacctgattgcttccatcgccttatccacatctgccggatcaacggccagaatcatgccgagtcccatattataagtgttgtacatcatctcttcttcgatattgcccttatcagccagcagtcggaaaatggccggaaccgcatagctgtctttctttaccacggcgcgcgtgccttcttttaacatacgcggaatgttctcgtagaagccgccgcctgtgatatggctgcatgcctttatcgtaatcccggcatccttgacggatttgagggctttcacgtaaatttttgtcggggcaatcagcgcttcaccgagcgtggttcccagctcttcataatatgtattcaggccttccgctgtaagctcctgttcgaataccttacgcaccagagagaaaccgttactgtgtactccggaggaggccataccaatcaggacatcgcctgccgccagtttctcaccagttatcagatccttcttatctaccgctcccactgcaaaaccggccagatcatattcgtcttccggatagaaaccaggcatctcggccgtctctcctcccactaaagccgctccggactgtttgcagccctctgctacgccgcttacgatctcggcaatcttctccggcacattcttgccgcaggcaatataatccaggaaaaacaggggttcgccgccggcacatgcaacatcgttgacgcacatggcaacacagtcaatgccgaccgtattatgtttatccatcaggaaagcaagctttaacttagttcccactccgtcggtaccgctgagcagcacaggctcgtccatctccttaaaagcagctgcggaaaaagctcctgaaaatcctccaaggcctcccattacttccggtctcatagttcccttcacatgttccttcatcagctcaactgatttgtatccagcttcaatatcaactccggcgttcttgtaatccatcattttcctccagtatttttagaattcactgttataaagcgcagcgcagtaacggggcgcagcgttctgtatcatcctctgattatttcttcatacgggctacatactctttatagccaatctcatctaatttctcagctttggataccacttcattcttcatctcttccgaataatccttcagcttctgaagaagctccggatcggaagcagccagaatcttggcagccagaattcctgcattctttccgccattgatggcaaccgtggcaaccgggataccggacggcatctggacgatggaataaagtgaatccaccccgcccagatctgacgtcttcatcggaacaccgataacaggcattgggaacagtgctgcgcacatacccggaaggtgggctgctttgccggcccctgcgatcatgaccttgtaacccttctcctctgcggatttggcatattcaaaaaacacatccggttccctgtgggcggagataaccgtcatctcaaattcaatccccattttctccaggaaatccgccgcctgagccattacaggcatatcagagtcacttcccattacaattcctactttagccatagttcattctccttttctgctgttatcatctgataattccactttcgcttatccggccgtcaggcggattaattcattactgtttcataataaatttattagccatacttataagtagttttaattaaagtaccattacttattagtaatgatactaggttttttttggcaagtcaataggaattttggagatttgaatgagaatgaaggatgcgtccggagacctcgtcgctgccaatgcctaatggcgaaaaataataatatgggcagcaattcttcaatataaaaattatactgaaattacgccagaccaaacggaattaaaaccggtgatattcttccggccttaattccgctcaatcagcatcctaacctgcttatttcattttttcctggcactcgctgcactccctgtcatggatagaaatgataccccgcatttggtacaggtatatttttctttctgctgttccatgaaccgttccaaaccgtattgacgaacaaacccgctgttttccataaggctggcctgataccttttattgtaacttttttcaaggttttttatctttttgcagggatagccgctgcattcaaaacaataagacagccctttatccctgacacaatcttttatcgcgcatttacggcaatgttccggcttgcctatatcgctgtttaagcagccggcgcatggctttttatgatagcaatgtttatagcagaccatgcagttcatgccgcagggggcgaacattatagtgtcgatattctcttttggcattttcacggcccggcctccttgtcatctaactttttcttttattctaccacatttaaaatctcaatgcacatgaaaaaatgaatatccccgttataccggtaaggaaataccggaatgtcaccagttttctctctgttgttagcgcatacatatttctttatcagccatagtacctcctgcgccggacaggagctgtctattgcgaatctccgggcacatgtcaccgacctcaacgataaccagcacgccctgcgcacaggtcaccgccttcaaaaaaggagcgggtgcaatagacgccccgctcctggtaaattcctcttatttcaaactgcctgattggatccgatcgccttcctgcagttttaaaatatccgccactttggcaaatgccctcaaaagagccggattgaactgtccgcactctcctgcctgtatcatttcgagagctttttcatggctgtatgccggtttgtagatacgttcactgacaagcgcatcatagcagtcagccaaagcaaccacctgggcccatatcgggatctcgtctcccttcaggccatccggatatccatggccgtcccacttctcatgatgccaccggcagatatcatggtaatatacgaatgaatccgaattcttcaagatttcgacgttctccagaatctcgcatcctcttaccgtatgcagtttcatgatctcaaactcttccgccgtcagcttccccggcttattcaaaatataatcgggaatggcaatcttacccacatcatgcatggccgatgccactgaaatctcctcaattgtggccgccgggaaacggtacgtcggatccgcctctccgagagcctgcatcagtatcttagtggccgtcctgattcttttaacatgctcacccgattcacagtccctgaactctatgaccgtactcagggtatcaaccattgcaaggctggtctcccgcagcttctcggactgctctttaatcttcctcgtctggccttcgataatgctctccatacggagacgccgctcgtaaagctctatcgtattcttcacacgccgtctgattatacttgggttgaacggtttgttaatcacatcatccacgcccatatcatagcctttattaataatctcatcggaatcctccgcagtgattaaaaataccggatatttttcattattatggtgccgttttaattccctcagcacgccaaagccgtccagctccggcatcacaatatcaagcagtatgatagcaatccgatcaccatattttttaattgcctccaaagcctgcaaaccgttctccgcttccgccacacagtagctctgaaagaatagttcttttaaaatagccctgttcaactctatatcatcgacgatcaagatgactttacgcagatcctccatcctgctttcccccgtttactgttagaattaaaattatcttttagtccagcctgccgacgcactccagtactttgttatactcttttgccaatacgttaaagagcgccggaaccttttcaaattcctgttccctggctgcagagactatcgacgccgcatctctgctgagctgttcaaagcccaggttagctgcaactcccttcaaggtatgggcgtacatttcaattcctttataatcctgcgaatcaatgcttgtattaagccgctgaaatgtctcatcatcagagaacttccccgcaaaacgtttccaaaggccctcattacctgcaaatctggctaaaactgtttcggcatcgccatccagtatatcaaaaacatcataaatattcatttattatctgcctttctaagtcacatatacagagactgtcaatgtactcattttcttatttttgattgtagcaaaaatagaaataatttgcaatgactttaaaggcccacttccttgtcatatgcgtgcatttttgttacaattactttcatggaaaagcgaattgattatgaaataaaagagaacgactgcggcaaaacaatcgagtcatatttgagagaacgcggatattcaagaaagattctggttcacctgagacagacaaatctgggaattaccgttgcaggcgagctggcctataccaccagagtattaaaagaagggaatattctgtccgtccgcctgtccgaagaaacctcatctgagcgtattattcccgtacccatggagctttccgttctctatgaggacgaagatttgatggtaataaataaagcggccgggatgcccgtccatccctcccagggcaatttcgacaacacgctggccaacggactggcatggtattttaaagagaagggcgaggcctttgtgttccgcgccgtcaaccggctggaccgggataccaccgggctgctgctgattgccaaaaatatgctgagcggcgcgatcctttcctccatggtttctgaaaaaacaatccgccgggagtacagggccattgtctcaggcctgacagaagaggagggctgtatctgccggccaatcgccagagcggaaggctccaccatcgaacgctgcgtggatccggagaggggtgagtatgcatgcacccgctaccgccggctcggctacgaccgcgataaagactgctccctgctccttatcacacttgacactggcaggacacatcaaattcgtgtgcatatgaaatatataggccaccctcttctgggtgatttcctctataatcctgattaccgttttataaagcggcagtcgctccactcctgccgccttacctttacacatcctctgacgggagaagcgatggactttaccgccccgctcccggaggatttctattttctaaggcccttaggataatggttcttaagaacgcctcctgccagctttgcccagccgcaggagtatccgtccaccgtcatcagagtccagcccttccggccgtcccctccggctgtgtccgttattgtttcccctctcagatatgcgtccgcttcccgggatacggccggataatcgcggtatccggccgcatcaccctttctcaaagccagcgccagtgcgtgggatggctcgaacctgtttttcttaaagctgcccaggtgaaggcccggcctgacaatcctgagcctgtcaatgcccggcatctcccccggtatccggtagagctgttctccgaaaagaatgaacgtctcctgctcagtccactcattcggctccgtgaggtattgattgcagaaatcataataatccttaagggcttttctgtcccggaaataggcaggatagtttctcttatgctccctgtccgcgccgtcttttctgaggacggctataaaatggccttctcccctggtccggtgcggccagattctgaccgtattctctatccccgcagcagaaccgttccccactccctgactcccgacgacagtccctcatagacaggcgtctcttctatggtaaattcaggatgtcctgcaataaatgtctccacggccatctcattctcctgcggcgcaaaggtgcaggtcgaatagaccagcctgccgcctgctttcagcatcctcgccgcattggcgagaatctcctgctggcgcagcgcgcaatgctctacattctctgtgctccactccctcacagcctcctcatccttacggaacatcccttcccctgaacagggagcatccactgcaatccgatcaaaaaattccggaaaatactccgccagacggccggagtcttcattcgtcaccaccgcattgcggactcccatccgctccacattctgggacaggattctggctctggccggatgaatctcgttgcttaagaggaatccttttccctgcagcctggaagcaatctgggtcgtctttccccccggagccgcgcagagatccagcaccttctctcccggctgcggatccaaaaagctaactactgccatcgcgctcggctcctggatataatatacgcccgcctcatggtatggatgacggcccggcctgtcctggggctgataataaaatcccgattccgcccagggaattggttccagcataaaagatgtcttagccagaaattcctccctgcctgtcttcagaagattcaggcgcagtccctgggaacgctccctgtcatagctttcaagaaattccccatattcatctcccagcatctgtttcattcgttccctgaacggcaacggcagttccatatcacacttctccttttatcatgattatttttcacagcattgccgctttttggcaagggtgtgaaaattaacttattgtatcacattccgttagttctgacaactttagcctgtgccgtttctgtgcatcgcaaagcgtgttactgttctcaccgcgccgctttctgccgaggtgagaacagtaacagatacatatacaggaagcaacacggagataataagtccagagcgtgtctgaaaattgctttctgtcggcagtgcgtcacactttatggcagatttggcccgaatgaattttaagacacgctctggctttggaggtgacatcatggtttcagtttttttttcgtatattattatcccgctttctacctttatgctggcccgcggaaccggttatttttccacaaatttttcttcaatccgcacgtccttatccagacagggcgaatttcttctgtggagtattataaccggaacatatttctttttttcactccgttttattcttttccaggcaaaaaagcagttcgatataaaaaaagagcttgtgctgctttacctctccgccggtatgatgtttgcctttgtggccacgccgtacctgcctgcccgttttcctcttttatccgcactgcacgtgttcagcgctctggtttccaccgtagtcctgtttttctgccttctttttctggcatttaaactgtactggaccgcccccggaaaagggcggccctgcctgcttctcttaatcgccacggccgttttctgtatttcttcctttattctctcaggaattatcaatacagccatggaaatctcgtttgtgctggcctgctgcctgctgatacggctctatctgcgcctgttttgcttggagcgcggcccggacaggaagcgcctctaagatttctgttcaataacaaaagcccggacgcttctcgggcttttgaatgaaccttatacatttattgatcgcgtctcattggcgctcaaagcggaacggcttatacagcgactgtccgcctacgcatagaccaccacggaaatcaggataaacacgacctgcagaaccatcatgatgcagaataaaggcgtcataaacttataccatttgttgatcggcactcccatcagcccgcactccagcgcgcaggcagtcggccagaacatattggagaagccgtcgccgaaatgataggccagcacggctgtctggcggctcactcccacaatatcggcgaccggagtcataatcggcatcgtaatggtcgcctggctggaggagcctgtgatgaagaagttaattacattctggattgccagcatcccggctgccgagaaatactggctgtgaccgttcagaagctgtgaaagatagtatacaatcgtatctgaaatcatcgcatcctgcatggtcaggagaatccctctggtgaaacccacgacaagcattgaggataccatactctgagtggatttgataaaggttttgcaaatcttcgtggccccgtagccaccaacaactccggtgatgatcatcatcatcaggaacatggctgcgatttcatcgatgtaccaccccagcttcatcgtgccgtagagcagaaaaccgatggtaaagacaaaaaggctcaggcagattttctgccggacagtcattgccccctcctccgcctcatgcacgggaagcgtatccagcttttccccaaaaagcaccgatttttccggatgggcctttacccttctcgcataccacataacatagaggatggacaccgtctgaaaaactgcaaaaataacgacgcggtagccaaggcctgagaacatcggcactccggcaatgctctgtgcgattccgatggaaaagggattcgtcgtggcggctgcaaatccggtcgcaattcccacaaatacgattgcgcccccaaccaccacatcatatcccagagctgccgctatcccgacaaagacgggtaccattccgtacacctcttcgtaaatccccatggtcgagccgagaatcccgaaggccagcatactgaccgggataatcagatatgtgcggctgcccatggctttaatcagacagttgatcaggctgctcagcgtaccgttgtcaatcagcacgtagacatatccataggcaaatataatcaggaacaggatattcgccgcgctgacataccccctctggagcgccaggaaaatatcaaagaagcccggcctgaccccttgcgtaaaatgaaatgattcgggtattacaatcattttattgctcaccggatcaaggatcctgtcgtactcccccgcaggtataatataagtgagcgccaccaccgtcaaaagaatcatcgtaagaatcacataggtgtgcggcatcttgatgttctgtattttgtcttttaattttcccattttgcctcccccttgttttcgtgcggctgcgtacgaaaacacctcgcaggaaagtagctgaaagcagtaacttccccatatacgccagaaatccccggggaaaattccccgggttccggtcataaactccagtattctaaattgtcatatcctgtccttccaggaaaactttttccacttttgtatcgtaatcaaagggatgctttgaccagataacgatatcggcgtcgcggccggccataagctcgcctttccggtcatcaatccccagaacctccgccggatttttcgtaaccgctttcagtccttctatctcatcaagtcctgcgcgcaccgactgcgcagcatatacggaaagatagtaaatcggtgttacgtcatgatccgcagtgatgcaaatcttgattcccgctttatttaacacgcccgccgtctcaaagcagcgtcccatgctctcaagcttggaccgcggatacatcgtcggccccaggatcaccggatagtcatgtttggagagaaaatccacgatggagattccgtccgtacagtggacaatgaccagcttcaaatcatactcctttgcaatcctgatcgcggtgcagacatcgtcggccctgtgtacatgcgcatggagcggaatctttttctccaacagcgggagcatgttttccatcccgatatccgtcctgaaatagcttccgtctttagccgcctcttcttttctgtgtttataatcaatggcgtcctcaatacattttctcagcagatacgcgttgcccatcctggtcttaaagctgtatccggccctctttggattctcgccaaagctgcattttacggccgcctttctttccagcaccatctcctccgcaacttttcccttgagtttaacgacactgcagatgccgcccaccacgctgtcgcttcccgggcagacacaggctgacgtcacaccggccttaactgccgtatccacggccagatcaaagggattgatgccgtcaattgtctcaagatacggcatcaccgcgtcgctgtaatcattacagtcgtcggcaatggcgcccatcccctcctcactgatacagatatggctgtgggcgtcaatcagcccgggagtgataaactttcctttcgcatcaactatctcttctccggcttcctccggggaaatcccttccgccaccttaataatttttccgtcctttaccaaaatatctcttttaacgaatccgccttcctcaaaaagcaggacctgtccatttttaataatcatagtctacctcattctctgatttatttgtaaccgttaaattactgtccacagccccgctgaaaagaacggttacatttattgatgacggtgacctgtgcgcagagcgtgcaggttatcgtttatcacttaatttttagcagtatccgatggctactgcgatcgtcataaagatgacctcaagcacaagcacgattccgaagaacggcgtaatgaatttgtaccatttgttgagcggtacgcccataagaccgcagtaaagggcgcaggaggtcggccagaacatatctgcaaagccgttgccaaactggtaagccagaaccgcaatctgcttgctcagtccaatcagctcggctgtcggagccataatcggcattgtgatggtcgcctggctggaagaacccgtaataaagaatttgataatattctgaaggaacagcatgccgtatgcagacacatacttgctggctccggaaagtaatgataccagataataaacgattgtatcggaaatcattccgtccttcatgacaatcaggattcctcttgtgaatcccacaatcagcatggaggaaaccatggcctttgtggattctataaatgttttgcagatatcggttgcagagtaaccgctcgctattcctgcaaaaatcatcatcatcaggaacatggccgcaatctcatcgatataccatcctaactgtgttgtaccgtagagcaggctgccaagtgttgcgaagaaaataagaagacagattttctgtcttgtattcattttagctccggtcagctcatccaggctctttctctggacgaattcactctccacaccgtacataatcgactttgtcggatcggcttttactttacgggcataattcatgatatagagaattgccgccaattcaaatacaaccagaattacaacgcgcaggcccagtcccgagaacatctccacaccggccacatcctgggcgataccaatcgtataggggttaaatgtacctgatgcgtatccgataatcacacccaggcagacaatcgcacctccgactacaatatcatatcccagcgccaccgaaattcctacgaaaaccggaaaaagaccgtaaacctcttcaaaaattccaagggtcgagcttaaagctccaagcacaatcatcgtaatcggaatcatgagctgaacctttttgcccaccagacgcaccagcgttcccagagccgcatccattgttccgttcttcaccagcatatagacaaagccgtatgcaaagataatcaggaacatgatattggcggcatccacatatccgcgctgcagtgaaaggaaaatgtcaaaaaatcccggcgccttgatatccacaaattcaaaacttcccggaactacgatcatctttccgctgaccgggtcttccactctctgatactgaccagccggaataatgtgggtgagaaccgtcataatcacaagtatcgttatcagtataacatacgtgtggggcatcttcacccgttcaaaccatttcttcttctctgttacttcattcatacttcattcctcctaaaattacaaaaatcgacatttctgttgttgctattataaagcttcaagtaacttgaatgtcaataggtttgagtgtataatagatttaacggaggttgggaggacgcgtccggaacggaccatgtccggtgtagtgggggctacctgagtcttccgtccccggtttggaggttgtcgtgacgggaaatccggccggaatgaatacttacggggaccgtttgcacttatggaagtgctgagtggcctcgacaaggtccgccccgcacttaacgcgtgagacattcagcggccgcaggccagtggacggggctgatacacctggcggagtctttcgtcccggagataaccttcctttggggcggaggagaagatatagtctgcggatgccttgggaatccatcgctgatttgcgaggttctgtcgagcttagcagcgtgatgcattccaccgagtgaaaacgtgctccgcagactatatcttctccgcagtcccaactcacaacaatctccccccgggacgaaagactcataaaaccatcccgccgccccgtccgctggcctgcggcggcgtcctcacctgtttaactaaatctccacagaaaggaaccccatggaaaaacatctctcaatcggtgaagtttcacgcttactggacatccctgagtccacactccgcttctggcaggacaaaggaattttctctgttgaaaagggcgaaaataattacaggcagtacacggtctatgatttgaccaatatcgcagagattgccttctaccgcaaccttggaatgcccgtccggcagatgggacgttttaatcagttctgtcttgaagattatgacaaggttctcggttccgtcaaagacacactgcaggccaaaatagaaatgtataccgccatgtatgaatctgcctgtctgaaaagcgaacatatcaaaagcatacaatacttgaaaaccgtagactatacgtacgaaaaagttcccttcggcactcttgtccgctttgaatacagcgaccgtgagcaattgatccggtatacacaaaatccctctctttacgttcgtctgatggattcccgcgatccggagcatgataagaacgacatccggggaattattgtttcttccgtccgggaacatgatacgctgatttggcagaaaaagaaagacagtctctatgccgtctttctgattgaggaaatcgcttccgaaaattatgtaaacgatatatccaaaaagctcggcacacttcagaaaaaacataagacagggattctcctggccaatttcctgctgggagaaactgtggatggaaagcggattgattatctcaaagcatacgttgagattcttgattcctgatttataatctccacgacggcgtgatttttgaacgataacccgcacgctccgcgaacatgtcaccgttttcaagcaaaaaggcatgcactgttctgccgcagcagtcagtgcatacctcatattcaggtcattctctatgtcagttaaattttctagtatataatcttgtagttgtcagatccctcgccgttgattacgtaatatgcggtattttcttccggttttacataaatttcaacagtcttgatatctgtctctttgtgtcctgctgccacataagcttttttagccgctgcgacaagtttttccacttctgcttcttttcctgcgtactgtacatatacggcagttttaatttctttcttcacaggagcttttttagcaggcgcttttttagccggagcttctttctttggtgcagcctctttcttcggcgcagccgccttctttggtgcagccgtcttcttcggtgcagcttccttctttggttcttcagcctttacttccggtgtcttcacaatttctttcacttccggcgcagcggcttccggtgctgcttcctttacctctgctacaggttttgcagtctcattaacaactgccgcctttgtctcagttttctttgttgctgccatctacttttcctcctcaaatcaacttataaacaaacttgctctgctgcattaatctgctgttgtcgattgagggaattataagcccaattttgctttttgtcaacctgggagagccttccattcgacaggcttgtccccaaaaagccttgaaaacactgtatttttctgttactatccgcggacagctcccgtatttttatttaaatattactaaataaatctgccagaaccctgtcaaagtaacaataccaaccaaaattggcgtaatgtaacgaatcgctataatccagagctttttcagcttaaacggcacaccgtccctctctatttcgctgatcagatactccggatgccatttccagccaacatagtaacacatggtgagtcctcccagaggaagcaggatgttgtccgtaatgattccgaaaaaatcaaaaacactgtatttgagaattgtaatatctcccaatacgccaaaagagagcgcacttggaatcccaacaaggaaaatagcgcttccgattataaccgtggctttgcgccgggaccatctgagcgtgtcaattgcaaatgaaaccggaacctccagaagcgctatcgcgcttgttaccgccgcaaagaatacaagggcaaagaaaaggaatgcaaagatagggcctcctttaatttctgaaaacaccatcggcagcgtgccgaaaatcagccccggcccctgcttcggttcaagctggaacgaaaataccgccggaaaaatagcaattccggccagaatggcaatcgccgtatcaagtcctgcgactgaaagacagctcttcggtatattctccttttcgctgagatagctgccgtaggtaattgtaatccccatgcacaggctgagcgaataaaatacctgtcccaaagctgcactgacagaacccaggctgaatccggaaccctccggtgaaaaaatgaatcggagtccttccgatgcgccgggaagcgtgacacttctcacaataattacaataaggaggacaaaaagcagaggcatcataaatttgctggccttctctatcccgctgatgccaaagaaacatatggcggttgtaattgccataaacacaaaatgccaaattacaggttcattgctgctgataaacatggtaaaatcggccggagccgctaaagtcgtgccataactgataatatattttataatccatccgccgattacgctgtaataactcagaatgacgaacgccgccatcacgccgaaaattccaacgatttttgcatgagggtcgatatcggcataggcctgtaccggatcatggcgcgtctttctgccgagagacatctccgtcatcattacgggaagtcccagaatcacaataaagaaaagataggctattaaaaacggaaagcctccgttccgccccatcagatacgggaatttccacagattaccgagaccgatagccgctcccgccgttgccatgataaagccgagcctgctggcccactgatttttcgcttgcataaattatgtcctcatactttctctgttaatagtatttccatgtcaccggtgtctcttcttaataaagatgaataccagtccgctgacccccatcagaatcggatagaagcaatatggtattatgtcaaagggagtcaggcccgtcaggctggccgccgccagaagctgggctccgtatggaatcagcccctgtcccatggagctgaacatatccagaagggatgccgctctcctgggcgtcacaccgaaatcactgctgatttctttggcgatcggtccggccataacgatagcaaccgtattattggccgtacacatatctaccagcagggacagagcggcaatccccagttccccgcctttttcgctgctgattcgttttcttataaaagacagaacaaaatctattcccccgtattctttaacgagagccacaatgcaggctacaatcatggaaataaccgtgatatcatacattcccataattccgtctccgacatgtacgaacatctcagcagctccaaaagctcctgtggcaagacccacaatcagcgacagcactgtccctgatatcaaaattatgaatacattgattccggccagcgcgccaatcaataccaccaggtaaggaagtaccttgaatatattataggacaaatctttcacaacataatcagtctttccacccaaaacgagaaaaataagcaccgtcacaatcgcggccggaagcacaatcatgaagttttcacggaatttatccttcatctcacatccctgcgttttaaccgcagcaatcgtcgtatcggagatcatggacaggttgtccccaaacatggccccgcccacaacggcccctgcacaaagcgccagcgaaaaacctgttttctcgctgatacctacggcaatcggtgcgagagccgtgattgtcccgacggaagttcccattgaaatagaaataaaacagccaatgacaaagagtcctgcaacagccattccggaaggcaggatagccagtcccagggccaccgtgctctccactccgccggccgccttaaccgaaccggaaaaagcgccggccgccaggaagatcaggcacatggtgatgatgttctcatcccccactcctgcagccgccagcctgattttttcggcaaatttcagttcacggttctgtgcaaaggcaacgacaagcgctatcagaaatgcaacaatggcaggcatactgtaaaaatcgcctgtaatgaatcccgatcctagaaagattaaaagaaacacaataataggaagaagcgctgacgccctcccctttttttcattttgactcatgatgatccccctgttattagtattagatgatatatctgccataaccagacattatagttcattattatatacgatttttggatttgtttcaatatggagatttaactgaggttgggaggacgcgtccggaacggaccatgtccggtgtggtgagggggactggctgagtcttccgtcccttgggtaggttggtcgtgaagggggaatccggccggaatgaattgctgcggggaccgtttgcactctttggagtgcgcatcggagtgctaagctcgaaaagacctcgctaagcaccggcggactcccatgtcccctccgcaattgattccgcctacttccccggggcagattttcgccagggacggaagactcaggcggaggttttcgtggcaccggacatggtccgttccgggcgctgattgtctccaaccttaaatggggagggccctgtcgcggccactacgtgtttccggcaggccgatatcaaaatcttccacaatttttttaaagtccattgatggtatatcgtatttcctgtacatggtagcactgagtggccgcgacaaggtccgcccccgcacttaacgcgtgagacactcagcggccgcaggccagaggacggggccgatacacccggcggagtctttcgttccggcgaaaaccttccgggagaaggagatactgccgacatcttccggcggagaaggagagaatgatatccggaaggacgttcgcccgagagatgatagctcttaggcagagggagacaaagcgcgccgggcggattttagccctacaagggcaaaatccgggacaacttgagcttcgaactcattcggagttcggagcgaatttgtccgtaaccccggagggctttgccttcctctgtcttagagctatccctcgaagaagcagtccagccggatattattctctccggctccgccctgcgaaaacaaaaccacagtatctccttctccaaccagcgatgccaaacccccgggacgaaagactcatatacacaccccaccaccccgtccgccgccgtaccggcggcgtcctcacctgcttaactaaacatttatgaacgtcttcccctttctcccatataataatatataaaaagcaagcgaggtatcagatatatggaaacctacaactacgatgattctgccgccatgcccggttatgacacagaaacttcagctaccccatctgttcctgaaaccggaaacagcaatgatgtaccggcggctcccggcttcggtcccgaaggtcctgtaacaccgtctgttccaacgaatccagccgattcgaatgttccggccactcccggatttggcccgtccggctccgttacgcctaccgttccgagcagcggcatgaatgttccggccactcccgggttcggtccgcttggccctgtaacgccttctgttccgagcaacggcatgaatgttccggcaactcccgggttcggtccgcttggccctgtgacaccttctctcccgtcttctaactctaatatgggatgtgtcaactgcaccggaaacatcatttggccaaattcttctaccggaatcctctggacctggggaacactctctccatttttctcaacaacttccgatatcgcccatgtccgcttctacaatgcggcagctattcgtgagcctcttgacatttacttaaacggtcgccttgtcgtatcaaatctggattacatgaattacacaagataccttcatatcattccaggcgtatacaggctgacggtattcagaagaaccaatcctggtgttccgattattgataccggtgtacagttccgcggcggcaacagctataccctgacgatcctcggaacagccaacagctactccgtacaggtaatgacttcataaaagccaggaatcccggttatcttctgtcaccgccatttatcggcaaaaacaggcagccctcctgctgtttcagggggctgcctgttttcacctgcattaaaataactatcttttagtcctttttcatcatttttgttttttcagtcacatgcttttttatcgctgcaaagctttccgaactcacgacatgttcgattcggcaggcatcttctaccgccgtttccctgttaacgccgagagccaccagcaattcggtcagcatcgtatgacgctcataaatcgtctctgcaatctcacgtcccgatggctccagagtgatatatccctcgtgatccatggaaatatatccgttttccctcaggtttttcattgcaatactgacacttggcttggaaaatcccagctcattgacaatatcgatggaacgtatcatcggtttgcgtctgcttaaaacaagtattgtctccagataatcctctgctgactgttgtatcttcaaaataacctctcctcttactctataatctccgccgcaggtccctgtggtacattctgcttccccggactgccggtatcgcttcccgggccggaaggtactgtctcaggggcgcttcttcctgggaaggcagctctgcaggcggcaggacaggcggtggtgtctgggctcccgtgccgttgcttccggatgaattcagtattcccgtcatcctgtttctcaatgtatctccggttatctggttaatcagcgcctgggcttccgccttaaactgctttttcgctccggatcctgattttctcatctgatcaatcaattcctgagccgcatccgccagagcgtgatcctttcggaaatcccctaccgtatatccgtctgagagaagctcgtcgtcatccctgccgggcagatactggctgccgtcaccgattccggtttccggaccgggctccgtgaaggatgccggttctaagccctctaccagctgttccatagtcttcttccagatggaagccggataagtggcaccgtaaaggtttgacagcatcttcggctggtcgtagcctacccatacggaaatcgtataatacggggtcatgccgcagaaccatccgtctttactgctgttggtggttccagtctttcctgctgcttcaatgctgcttctccagcccatcgaggcggccgttcccctggaaattacgccttttaaaatatctgtcattacgttggccgtattttcctgatatacctgaatgacaggatactcttcgaaaacattgttgccttcgttatcgagcatcttaacgatacaggtcggttctttatagcgcccgctgtctgccagcgccgagtaagcgcccgccatctcttccgtcgtcgctccgtaggtgaagccgcccagggcggaagccggatagtaatcatcaggcacaatattgtcaaaccgcatctgtgtcagataggacattccaagttcaggcgttatatcatcgtatacataccatgcaacgccgttgcggctcttctccaccgccgtcctcagtgtcatcatatctcccggcagatccttcaccacagcatctttctgtttggcatcctgaaccttgatattcttcaccatcgtcgtggatttgtaaccgttctccagcgccggggcgtaaacgatcagcggtttgatagtgctgcccggctggcggaagctctggaatgcgcggttcagcgtatacgtatccgtatcctggctgcggccgcccacgatagccacgacccggttggtgctgttgtcaatcacagtcgcggcgccctgtaaagagaaaattccattttcggccaccgcctcgtcgaatgtcaggacactgtccaccgactcctgcagaattctctgtttgtccggttccagggaagtgtaaatcgtataacctcccgtatagagattatcccgctcctggttgtaaacttcctcatacctgtctttgtattccagatattcgctcttatcctggaaaccatacttgaaatcaaatccatccatcctcatcagatagcggatcgcacaatcgatggcataggtcgtctcataattcctcatcggcgtcttcatccgctgcacattgatggtttcctcaagcgcctgcgaatattctttttcggtaataaatcccatatccttcatatcaccgaggattttatctcttctcttaatggcattctccggatgcttgtaaggattgtagtaggacggtgagttcgggatcgcgcacagatatgctatctggctgaggcttaaatcatttgcatccacgccgaagtatcccctggctgccgcctgcagtccgtaatacgtattggcaaagctgatatcattgatataaaattccatgatctgttttttggtatacttcttcgtcagatccatggcaatcagcatctccttggcctttcgttcaatcgacacttccctggtcaggaaccggttcctggcaagctgctgtgtaattgtgctggcgccatgcttttcttcgccctcggtcttgaaataattgatggcgacacggaaaattcctttaatatcgattcccgagttgtcccaaaatgtcctgtcctctatggctataaatgcgttcaccgcatactccggtatctcatcataggtcagatagctggaatcctcatcgccggtcaacttagcaagaacctcgccgttcgcgtcatagatgaagctggcctcctgcagccggaacgtgtcgggcgtgctggcctccacaatcccttccacctgtgtcttatactcgagatacatcggatagaccttataagcccctattcccagaactgccaccagcgcaatgacacatatgataaaaagtgtcatgaatgtaactttcagcaccttgaacatcgatctgaatataatcttgatgtatttccacagaccttttgaattatccggtttcttttgtttttctgcttttttcacttttctctgctgcttcttttcctgtttttgtgattttctgcttctcggctttctctgatgaagctgatcgtccggttcttggtcccggacatcctccggttcattctgcatattggttcctgtatggcttaccagggaagatgcttcgtggttttctgccggcgtctcatcccggccgtccgccgatacttcggattcttgttccggttcattcgaagccgtattttccggcgtcttctccggctgacccatcagttctgcttccggctggtcccccggttgattttccggcatattttctgttgtcaattcctgtgtatcatccagtatgccttcctgtctaccttccatttcataccccttttgtcatcagtatatttctattactgtttatggctttccataccttaatcgtgccgcaaacagtaacatatttctgccgcaggcagagtatgtctcttactattataggagatttcccattaaagaacaaccattaattccaaaacttacttctgtaaccgcctgttttttcacgaatagtataaaataacagtaatttttggaaggaactatccatgaatacctcctttccccagctttttctgctcattaccgccctgtcgctggacgcctttgccgccagctttgtctatggaactgaccgcgtaaaaatcccggctgcctcagtagctgtcattacagccctgtccaccgggattctcgttctctttcttctgctgggcaaatggttcggagggctgattcctcccagggccacctccgttctctgttttctgattctctttgcacttggttttatcaagctttttgacagcacgataaaatcattcatcaggaaatcagatttttttgaacgcaaggtttgtttttcaatttctaatttgaatttcatcctgacggtttacgctgatccgtcggctgccaacggggaagacattgccgtcctctcacctgtggaagccctgtcccttggcctggccctgtccttagacagcgcggcggccggatttggagcaggcatgatggtcactcatctgcccctcaccattcttctgtcccttttacttaataccgccgcagttcttctcggaagcttcctcggccggacgctggcgaagcgctccagtctggatttatcctggctcagcggcctgctgctgatgggattagccctaggcaagctattatgaccctgctgtgccgcaaagctgtctatgctatctctttgttatggtttttaccaacgcaattacttcatgcgccagcagcgggacggccgccagcagcagcaggaacccccactcgcccggtgaaaggactgccgttctgaaggcatcgactaaaaacggaatctccgtaacggcaaactgcaggcagagcccggctgcaaatgccacagccatcagcgggttggtgaagagtccgcttctgaaaattgatacctccacgttgcgcatccccacggcatgaaaaagctccgataatccaagcacagtgaacgcataagtctgcgcccggcagagcaccgcttcttcccttagaaccgcggaaacagccgtcaaagagaattcaactcctcttccggtcaccacttcccagggtacacggaaaaatgccgcaaggctgattgctgctatcagcagtccgtaaaataccgtatagaaccatcctcctcctgcaaacagactctctcccggctttctgggcggttttttcatcagcaggctgccgtcatttttatccacccccagagcaagggccgggagtgaatctgtaatcagattaatccacagaatatgactcgatttcagcggcgaggggatacctgccgcgatggctgcaaacatagtggctatctccccgaaattggaggaaagcagaaaaataaccgacttctttatattttcataaattcctcttccttcttcaatagccctctcgattgttgcaaaattatcatccgtcagtatcatatccgatgcctgcctggccacgtccgtacccgtctttcccattgctattccgatatcggcgctctttaacgacggagcgtcatttacgccgtccccggtcatagccgtgatgttaccgtcggattttaacgcccggacaattcttaccttatgatccggggacacccgggcaaatacagccgcattccgtatccgttttttcagctccccgtcatccatccgctccagttccgcgccggatatgcactgccccttctcctcggcaataccgagctgccttgctatggcgaaagccgtgtccacatgatcccctgttatcatcacggttcttaccgacgcccttttaaatgcttcaacagcagcttttgcctcgtccctcggcggatcaatcattcctgccattccaaggaaaacaagatttttctctgtcggcttcgtcaccccctccgccatggctccggccagaacacgcagggcccgtcccgacatcgtctctatggcctcctggattttctttctgtccctgccttcgaggggctgcacttttccatccttcataatagaggtgcagcgtttcaggacctcgtccggagcgccttttgtataagagacatatgacttgccttccctgttgagggttgtcatcatcttccggtcggaatcaaaggaaagttccgcatatctgggtttctccctttcttccctctctttcctgataccgcccgtaccggccagccggattagcgagatttccgtcggatcgcccgtttcctccgtcgcatcattgcacagacagaagcaggtcagaagccggtttcctgttttcccatattcaattgccggggcttccctgattcttccgtccagatagcaggccgttaccgtcatttcattttttgtgagcgttcccgttttatcggaacacaccacactgacagcgcccaatgtctcgaccgacggaagccgtcttacaatggtccccgcctttaccattctcgtcacactgagggccagtacaatggtgactaccgccggaagtccttccggcactgccgccacggccagggagattgccgtgatgagcatctccatcacatctcttttctgcaccactgcaagtacaaacagcagggcgcacagaaataccgccgtaaggctcagcacctttcccaaatccgaaagtcgtttctgcagcggcgtctcctcctccggagcctcatgaatcagcgcggcaatcctgccgatttccgtagccatgcctgtagccgttacgattccgcagcccctgccgttcgttacgtaggaagtcatgaacgccatattcttcctgtccccgacctgaacctccgatgcggcaacaaaggtactgctctttgaaacaggtaccgattcccccgtcagggcggattcctctattttcaggtttgccccctgaacaagacgaagatcggcaggcacctgacgtccggcatccagaaccaccagatcccccggcaccagttcctctgcgggcactgtcatctccctgcctccacggatcacaaccgcttccagctttgtcatctttctcagggattccagcgccttttccgcctttccctcctgtatcacccctaccacggcattcattgccaccacagccagtataatcacagcgtcactgtactcatgaagcataatggaaattcccgccgccgcaaacaggacaaaaatcagggaatcacagagctgttccgcaaatctctgtgccagtgtttttttcttcgcctccctcagcatattttttccataatgttccagccggatgccggcctcttcctgagtaagacctgtccggccattgcattcaaattgtctgcaaacttcttctattgttttgttttcgtacatcttattctcccttcctccctgtgacaggttgtcttatagcagcagttctgacagcatgaactgttacgtcttatggaacaatatgacaaaacaataaaaaatagaacttgccgttacgattcacggctcaccggcctgtgagtgtataggtcatctccttcaacaaaaacaggagagaacctccggccgcatccgggccttccctctctcctgttttccggacctcggtccggccttctgttaaattgaaacaactgaagctccgggcctgttcctgcctatgaatggttcccggcacagccctgcttatcttctttgcagtgattgctgccgcagtcatgtccatcctcgtgatgatgactgcatgatgtgtccggattataatccaggctgcctgcaagcagcttgtccacactctcatccgctgctcccgtgacacccggataaaggcggattcccagttcatcaagtgctgcccgtgcgccggcgccgataccgccgcagatgagggtgtccactccatgctccttcaaaaatcctgcgagtgccccgtgtccgctctctcctgtactgtaaacccgggaggatatcaccttatctttttccgtctcataaatcttgaattccccgcaatggccgaaatgctgaaaaacctgtccgtcctcataagttaccgctattttcatcattacatacctccaaaaacatttttatacctgatttgcaaactgtcatctgcagacaggcacttctttagtctactctcgtttttgtcatatgtcaataatcacttgtgcagtcaccacattgcctgtttttcttctcacagcaattttcacacccgcttcggcggcactcctttttacagcatccggccgaatggggacagagttcataggcgcctccgctgatacagagccttttgccgtccaccagcacctgtgccagctttttcctggctgaatcataaatattctggaccgtagtcctggcgacgttcatctgagccgcacaatcctcctgggacagccccagccggtcaatcagacggacagcttcaaactcatccattgtcatcgtaaccgtgccctccgctttcccgtcacccggaataaattccgttacctccggcagacagcaaatccttcttcgttttaccggccgcgccatccataccgcctcctaccgttcctttttgcaaaataccgcagaacagcgctcagccattctgcggtaccctattacttaaaatttctgattattcttcaactgttgcgtacataaagtaccagtatccgtatggagaatgccaggttccctttaatttcgggctctgtacccagaagtcattctcataggcaacaggtgccatagccgtatcctctaacagcatattctctgcttcatgaagcagtttgtagtgttcttctttgtctgctgttgtacgcgctttttcaaccagggcgtcaaactcaggattgctgtatttaccgtcgttgtttccgttgtttgtctctaacaggttgatcatgttggaaggatcatcgtagtcatatacccagccgttacgtgcaatctcgaagtcaccgttacggcgtgtcggtgtgaatgtggaccactcaacgatcttgatatctgtattgattccaagctctttccatgcgctctgtaaatactcggcgattggtttgtggtattttgcatcatttgtcatgtactctaccgtcggaatccctgtccgtccggatagccggcttctgcaagaagctgttttgccttctcgaggtccgcttcgtaattatcaacgttaaagaagtcgccgccgttgttttctctggtcacttcctcgaaggaggatcccggcgcggcatcagagatgccagggcctacaaagttagtagccggggaatatgttccctgagttactgtctctgcaatgtatttacggtcgatggcaaggcttaaagcttcgcgcactttctcgttgtcaaacggtgctttctgaaggttgaaggagatgtagtaggttcccatgatcggagcgatatggaaatcttccgtacccatcaggcttggaacttcctcggaaggaatatcttttgccatcatgatctcacctgtcttatatgcactgtaggaagcatttgcatcctccatcaggacaaatttcaccgtattgaccgtaactttctcagcatcccagtagtatgggtttttctcgtaaaggatataggatcccggaacccactctttcattctcagagcgccgtttcctacatatgtttcagggttgattgcccactgatcgccgtttgcctcaatgatgtctttctttacagggcttaatacggcaaaagcggaaattttatcataatatacgcatgggtttgcaagctctacaacaaatgtttttgcatccggagcagatacggcaagtccatccactgctgccagtgtctcttcctctgttgcgtcttctcctaaattcaggattgcatcatagcctttcaccatgcagagcatgtcataggcatatggagctgctgtcagcggatttgcaagacgtttgtaagaatatacaaaatcctcagccgtcagatcggaaccgtcgctccattttaatccgtcacgcagatggaatgtataggttaaaccgtcatctgatacctcaaatgattccgcctgtcccggaacaacgttgttctcctcgtcaaaggtgagcaatgtctcaaatccgtgaataatcatgttggctccgtcgattgcggagtttaaggccgggtcaagtgtctccggatccggtccaatctggactgcaaggtctaagccccccgctgtctcacctgctgctgttgttgtgccctgttcgcttcccttgctctcatcggttcccttggaaccgccgccgcagcctgcaagaactgtggtggaaagcatcgctgctgctacgagtagtgctacttttttcttcataatatcctcctttggatttttattttaaccggccgcctgcctgatgcaggcagccggctaagtgcatatcaatgacaaagtcaattcacccgatccaggtgatggcaggccgcataatggcccttcgacacttcctgccatgccggcgtttctgccgcacatctctcatcggcataaggacatctcgttctgaaccggcagccggacggcggattaaccgggcttgggacatcaccgcttaatacaattcgtttagactgtctgctggttctcggatctgcaatcggaatagcggaaatcaggctccttgtatatggatgcacactgtggaaggtcaattcatagctgtccgccagctccaccagatttcccaggtacataactccgattcggttggaaatgtgctttacaattgagaggtcatgggcgataaagagatacgttaagcccatctgctcctgaagctcttcgaacatattgaccacctgtgcctggatagatacgtccagagccgaaaccggctcatcacacacgatgaattccggatcgacagccagtgcacgggcaatgccgacacgctgcctctggccgcctgagaactcgtgaggatatcggtttgcatgctcggagttcagccctacgcggcgcagcatctcaataatcttatcctgcctgtcctgtttgccggacgccagtttatggatatcaattgcctcaccgacaatatcacctaccgtcatacggggatccaggctcgcatatgggtcctggaatacaatctgcattttccggcggtaaggcagcatattaaccgccgtctttttgccgaataccggttttccatcggccgtccggggcttttcgtcttccccgtaaagcggcacgtcgccgctgtcaaatattgtctcgccatcatagatgatccggccgctggtcggttcatggaggcgcagaagggaacggcccgtggtcgtctttccgcagcccgactctcctaccagtccgagcgtctctcccttattaagaaagaaggagacattatcgaccgcctttaccactttcttttcaaacatcttgccgccggcaacagggaaatactgtttcaggttctggacctcgactaatttcttatcttccatcaaatcttacctccctgtgctttctcaaattccgccttctgaaggagccagcaggcgctgtaatgaatatccgaaatgtcggtatattccggcatttggcgcaggcagatcttcatacaggaatcacatctcggtgcgaacggacatcctgccggaggattcagcatatcgaccggacttccctcaatcgggacaaggcggctgtgctctttctcgttcagcttcgggatgcttctcagaagtccctttgtatattcatgggacggattatagaagatatcctccgtcgttccatattcaactacttttccggcatacatgacggcaatcctgtcacacatgctggccacaacgccgaggtcgtgtgtaatcatgataatcgccatgccgagtttttccttcagttccatcatcagctccagaatctgggcctggatggtaacatcgagggcagtggtcggctcgtcggcaatcagaagcttcggttcgcaggccagagcaatggcaatcataacacgctggcgcataccgcccgaaagctcatggggatactgcttcagcctcttctccggctcgttgatgcctaccagggtcagaagctcttttgccctctccctcgcctcctgcttcgatttatttgtgtgaagaagaatcatttcacaaatctggttcccgattgtatatacgggattcaggcttgtcatcggatcctggaaaatgatggaaatctcttcaccgcggatctttctcatctggttttcagtcatctcatcaatccggtgtccgttgaattccagggttccccctatcaatttaccgggataagcggtcagtcccatcaggctgtacgcggtaacagatttaccggagccagattctcctacgatacccaggacctccccttccttcagatggatggaaacatcatttaacgcctttacctcaccggccggtgtgaagaaagagaggcgttcattcttaatatctactaaatattcgctcattctctattcctcctagttcttcatcttagggtcaaaggcatcgcgcagtccgtcgcctaacaggttaaagctcagaataatgacggaaatcattatcgccggagcaaacaggcggtgcggatagctctgaagaccgttaatagcggcgctggcaaggctgcccagggacggcatcggcgcattaacgcccagtcccaggaagcttaagaaactctccgtaaaaatggatgacgggatctgcagcgtcgttgtaacgattaatgtaccgatacagtttgttaacagatgttttctgataatcctgccgctggaagcgccgagagccctggccgccgtcacatactcctgctctttcaaaatcatgatctggcttcgcacgatacgggccataccaacccagtaaagaagggcgaataccagaaaaatactgatcaggttaacaccgattacaccgatccattcaaatcccggcttctgcgacaaatccttcagcggataattcagcacggcagccagcagaatgatgatcagaacatcgggaaccgtatatatgatatcgacaatacgcatcatcaccatatcgacccatccgccgaaaaatccggagattgagccatacagagaaccaatcagcagaatgatggccgacgccaccagaccgaccagcagggatacccggcttcccatcatgacgcggactgcgtagtcgcgtcccaggttatcggttcccagaatatgagggaataccttctctcccgcttcaatctgagccagctccgtctcggaatactgcatcggcgccaggtttacgctcgttttaatctgctgttcatatttatatggataaaccgtcggtataacaaaagaaagtacgaagattaccagcacgacaatcaggctgaccatggcaatcttattctttttcaggcggcgcatgccgtccttccagaatccgacgctctctctcattacaacgaggctctgtttctcgctttcatctgccgggaggaaatcttcgacattcatctgaaatgataatttattcttgtccatcctgtgtgcctccctatttcagtttaatacgcggatcgatgatggtatataaaatatccacgaccacgttcatcgtaataatcaaagttgcaaggaatattgtggttcccataatcagaggatagtcacgccctgtgatggcgccgataaattcggaaccaaggcctgggattgtgaaaatcttctcaacaataaagcttcccgtaaccgtgtacgcaagcagcggcccaagataagtaacaaccggcagaatggcatttctgagcgcgtgcttgaacacgctgaaaaaccatgccacgcctttcgccctggcggttctcatgtagtcctgtccaaggacatccagcatggaagaacgcatcagacgtgaaatgtaggaagccggatacagcgccagcgccgtcaccggcatgatataatgccgccacgaggtcagtccgtatgtaggcagccattccagctcgaatgacagtacatacattaacagcgtggaaataacaaaactgggcaccgcaattccgcaggtgctgaatatgataatgatattatccgtcatcttgcccctcttaaatgcagcaatgctgccaagggggacgcccaccagtacggctatcaggatggagattcctccaagctttgccgaaaccgggaattttgtctcaatgatggaattaaccgtacgtcctctctgttttacactcgggccaaggtcgccgtgaagcaccttccccatataaatggtatattgttccggcagtggtttgtccagcccgtatttttccatcattgcctgctgggcctggggtgtgagggccttctcagccataaacggaccgcccggtaccaggttcatcaggaaaaatgtaagagttgcgacaagccagcaggtaacaattgccagaccgattcgctttgcaatatattttgccatgatacctctcctttctgtatgtgaccatgccgaattttgtcctaaatttccatctatcattttccggtttttggaaataatggacactataaacacatttgtcaatctactgcggacattcaaacgataaaataaaatcccatggtggtattccatgggattttctgtttgccgttatcccgctatctagacattatgtcccggcttttatgttcattgccgcagcattgaccataaaaggaccataaaaattcatttttagtcacgtttcatagtataccatagtaattgacgaaatggcaatacgtttcccagtttttttacacgaaaaaaagcggaaatttttcctgccatttccgcttctttcctgtcatttccgcttctttcctgttaaatatttgctgattcctccatgattccctgaagacggctccaatcgttcatggaatatttcacggcaatatatcccaggtggtgatccttttccctaatcgcctggataaacaattcatggtgcagcagtacggaaaaatgattttcatagctttgctgctcataggagttcagtatgtaaggcctgaatatctctatcaggttcctgtaaacctcctgtaatacacggttttttgttatctccgtaatagtacggtgaaacttcatatcaagatccaccaggatttccagctctttattctcttctatggcctggtgaagctcattttccaccaggcatatccgttcgatgtcactttccgtagcggcgcttattgcctgtttaataatcccgacttcgagaatctctctcagactctgtaattcgacaaaatccgaaccctgggaaatgatctggaaaaacagggcgtcaaacattccggcgcccgcagacgcgcatacatacgtaccgtcgccctggcgcacctccaaaattccgtatgattccagaattttgatcgcttccctcacgcagccccggcttttgttgaattttttactcagttccggttctgtcggcagcctgtctcccaccttcagttctttattgattatcatttttttaacggcagcaacaatttggtttacatatgatcctgatttttccacttttaccttttactcctaatttaatggtctcattatatcctgttttatcttaatatgcaatattttcagctccgtctccgacagcgttactattcacggcccggctaactgccggtcaggcccgtctccccgaatagcttcttcagatacaggatggactcctctgcccactcctcctcctttttcagggttttatccaggttatcttcagacggcatccagaattcaatgatcgtgctgaaatcctgctgcgcttccttaccgagcctctccagaatcatttccaccttctggcgtccccgtcccaccggggttcccactatctgcagcccaacactgcccggactcctgactatcgtgtaatccttaaaatgaagacaaaccgtatactttgccagccaattcagaacctcttccaccgtttcctcctgtgacagggaattggtggtatctaagacaattccatagcggcggctgtccagccgttccattatataggcaaattcctctgccttaaaccggtcatgattctctattcccagaacgatatctttctcctccaggaccggaaggacacttttcagcgttattataatctcttccagatccggctcataaccattgtcatcgatcacacagcgcagcagctttgcatccagtttttctgcaatagcaatcattcttaacagatttcctcttgccgcccctctcattcccacttccagctttatcccgttctcctcagctttcctgcgtatatccgcaagctcctgcggcaggcagtgagctaacggactgttctcgcagatttgtacataatgaagattatatttcttcgccttctcaatcagttcacagggcggcattgcctgctttacggccagctccggtctgatcaggcctcccagtccgcagtgatagggataagtccaggagccgattcccagttgtgtccttctcttcttttctactgtcttttctttcaacgtctcttttcctctccttcttttccactgtctttttgccctgtctcccggcatgccttcatcgttacccaatcagctccggcagccacgtaataatctgcgggaaattgctgattaggattacaaagataatctccactatcaggaacggcactatcttcttacaaatattttctatcctgctgcccgagactctggatgcaatatagaggtttaccgccatcggcggagtaatcattccgacagatgtattgattaccataatgattcccagaaccagcgggctgattcccgccgcattcgcaatgggaagcagaatcggcgtcgtcagaagaataataacgctggtatccagaaagcatcccagaataagcaggatcatgttaattgccagaaggatcataattcggctctcaaccgtgctgatgattgctgtggaaataattcccgggattccctgactcgtcataaaccaggcaaacggagccgaacaggcgcagacaatcagaatcgttcccgtactgataccggcccgttcgatacaattgccaagctccttccagctcagttccttataaacatatctgctgataataaatgcatagaacacggacactacgccggcctccgtcggagtaaagataccgccgtaaatacctcccagaataattaccggcatcatcaatgctccgagagcctctttaaaagctttgaaaccggttattccctgagcctccatctctgccctgaccgcatatttgtcacgcttgtccttcctcataatccacattgaggtcagacaaagaatcaaagccagcaggattccggggaccacacccccaatgaataaatccgtgacagataccgaggctgcaattccgaaaaccaccatcggaatggagggcggaatgattacgccaagtgttcccgaggcagccgcaatcgctcctgccacatcgtccggataaccgtcctttttcagttccgggcacatcatccctccgatagcagaaacagtcgccggattcgatccggaaattgcaccgaaaaacatggatgccaccgttgtgatacaggccagattggcaggcagccaccaaagcgctgctttgacgaactgcaccagcctttttgaaatacctcccttcagcatcagttcccccgccagcatgaaaaacggtactgccataaatacataattatcagcctgggtgaaaatccgctgtgccagaactaccatattggtgttcggctcaaaaatactgagcgcggcccaggatgacattgcaagggaaaaacaaattggaatgccaaagaagattgccccaaataaaacggcaaacaatacagccataatcattttgcctctccccccttctcatcctttcctgataccaaccggattgactctcgcagaacagcctgcaccactcctaaaatcattcctgccgggatcgatgcatacgcaatccacatcgggattttcagagtcggagacttctgtcccatggccgcaatcttcatgcagcattccacaccgacctttgccaatatcagcataaacgcaacggtcgccaggacggcacatcccctgacaatccctctgatgcttgcaggcagtgcatcaacaaccgccgtcatcttgtaatgtccatcttcctgcatcaccagcgcggctcctataaaagccatccagatcatcagataacgggcaaattcttccgcccatatcaactgagcggtaaataaaccggtaatacgtgcaagtgtattgagaagaattatgatacacataatcggaagaaggattataatcaatgttttttctgtttttgcaagcgcgcctgcaattttctgaagaaattctttcatatcattctcctgtaacggtgaaagacatgtttaacatgcctttcaccggtccttctggtttaagatgctgcgttcctgctgtgatcaggatggctcctattcataaaaagcgttccagtattcggtatctatcccacctttatacttttcagccactttagcggaagcatccttccattcctgggtgtcaacctgggtaactgttacaccatattcatcccgagcgatctctgcaatctcatccattttttccattgccctgtttcgcataaatacggctgcatctttaccggcctgctgtacggccgcctgctgctgctccgtcagagagttaaacacatcttcattgatcaggaatacatatccggaaataatgtggcctgtcatggtcaggtacttggcagattcaaatgctccctgggtgtagaaggcatctagaatattatccatcccgtcgatggtcccctgcgccagcgcagtaaaagcctctgtggaagccatcgcaaccggattcgccccgatctcacggtagaattccagatgaatgtcgttttccatggtgcggattaccaggtttttagcatcagccggttttgtcacttctttttttccgttcagcatacagcggaatccctgatggctgatggcaaggccttttgtaccgattgaagagaggctgtccagcattttctgtccaatggctccatccataatcgcataggcatcttccagtttattcatatccaccatatatggaagatcccagatattaaaatcatccacaaagttggcaagaggagccgtcgagccggcatacatctctattgtacccatagaaacgccttcgatgacatctctctcatttcccatcgttccgtcataaaacacttccagcctcacggtcccgtccgttgccttcttcaggctctcgttaaacacttccagagcttcggccggaagggaattctgggatacggtaattccacagcgtatcacagccgcatctttgttgtctgccggttcctctgccttcggcacctgacccgctgcaccattcgtgttttcctgctcctgattttcagtccggacggtttcagacgcagtgtctttctgtccgcatccgcttaatactccagccgtcattgctgcgcataacaataagctaatcgtttttttcattggttctcctctccttttgttttatcatttcctgctgttacctgcctgccgcagccgttatatcgagaatactcttcgtgacatattcctccgagaccatctcatccagccagccgtccctgaaaatctgattcattgaattttccagtgccaaaatcgctccatctgaaaatttggcatcaaccagcccgaacgtaattgccacctgcactctcaaatgccccatcagaaaagaaaacagtgcgtccttcggaacgccaagctccacaaatcggtcataggccagtttgattgcataaatcatcggagcaccgatggattccaccatcccgggctcgcacattcccatctgttcaaccgtgatacggaatgtctttcccaccggagcaaaaataatccggctgatcttctctccctcggcataatactcctcttctcttccctcaggcgccttgtaaacagcgcaggaacaatcctgggtgacaatacctccgaacagatccggttccccgttctcatccacttcagtattgaacaaatacgggtgatggggatgtaccacaaaatacgccagatcatcacggacaggcatgacgttggcataggccgccgccggatccagtcctacaaccatggctcccggcttcataataggaatgatttcaggcgaaagctttcctattaatatgtcgggaacagccagtaatactatgtccatttcaggcaccgcagtttccatcactgcgatatcttgaatccccagtccctcgagccttgcaataccggcctcgctgatttcgcaaaaataagattcatattcttcgctcgtccataattttctgctgacacgaaatcccattttcccgcccgcaccaataacaatcagttttttcttcatcgtatactctccctgtcttgtctcatttgaatcatccgatgtttcgccctgtttaacgccggcagttaaactttcaacggcaaacatcttatgtttatatctttagcatatagaattaattagcatttgtcaactataaaatgtctgtttttttatattttttgtttaatttatactctaaacttttattttatgcagccccattagaataaacatcatatctttaaagaaacgtaggggattttatactataggaatatttcctcgtatgataaaaagcgcagccggcaagcagcatctgtttatcatgctgtttgccggctgcgctttgataacgctccgtcatttcttcttttttggccgtttatgcatcagaaatcaattcttcttccctcttcggcggactggtaggcggcatagataaccttggtggtttcataagccaggctgaatccggaagccggggcgcggtcataagccacagcctccatgaaatcctggagttcgcccatgtagccccggataatttcatcgttcacaaacgctttgttccatcccagcttagccggaagcatctcggatatttccacatcctcaagtccgtcttcgtccaggaaataggtattcaacagatcggtaggagtgatattgcaatttaaagcagtgttatttccatagatctctatgtagtttttcgtgcctccgagaacggtatcgctggctatacacaaagctttcgtcccatcggagaacgtcacgctgattacaccgtaatcctccacatcttcgggctgtgccgcaatatggcggtgttcatccccggtcaggcaccgggtggcacagcccacgtcacagctcacgctctgaaccgtgatctcctcatttcgggccgcggcctcctgctgcttgagccagagcataccgcccatcggatgggttccggtacgcatcagagtgccgccgcccgtcttattccatttgcctgccaccggactgctggagcctttcaggctctcctcgcccttcataaaaagcagctttgtctttttagcccggatgatctcagcggccttctgcaccggtgtggcataaacgaagttttctgcatacatgaacttcttaccggtcttttccaccacctctttcaggcggtccatctcggccaggcactggctaagcatctcactcttcggtaccgtaactccgatattctcctgtcccggccggccgaagtatccggtcagaggcttttcgcagataacatgcttgcctgcctccatggcctcgatagcgatggatgtatgcaaaaaaggcggaagtacgatatcaatcacttcaatttcaggatcctccaacagcagacggtaatcgctgaccgcctgttcatagccgtagcgctccttcaccttttccgcaagcgggagattcagatcacagacagtctttagccggacagaaacgccgttcaccttctcgtagccgttaccatgcagataggcggcgtagcccgcacctacggttccaattactacagtttttgtttgaccacaactcataacttttccctcctgtcagctgataaatacctctcttaataaaataaggttttcgtctttttcttgctgtttttattaacctttgatattattaagatagcacaggacgggaggtggaacaattgcgttccccgcctttattcataacatttcagttatgtatttatagtaaacgacaaaaaaattgccgtttactataagcctccgggggatgtacacgatttttgcaaggaagcttctgcgtttacacgcagcaaaaatcggcacaggaaacgtcataaggaaaagatttatgacgtttcctataatttatattgcgcatgaaaggaggacaggctttctgcctgcagcatattatgactcttcgtcaattacagcatttcgagaatctggcccgaacccagcactatcagcgttctgccgagctgctgggaatcagccagccggctctcagccgctcaatcagttccctggagcttgaacttggcgctcctctctttgaaaaacagggccggaatgtggtcttgaaccgtttcggacgtgtttttgcagaacatatttttaccgccatacatgaaattgacaccggtgccgctcatctccgggatatgaccgatccccggaaaggcgtaatcgaaatgtcgctgaactatgcaacctccaacatttatctcccccgcatattgcgcgcctacatggccggacgaaatcaggatgaactgaccttccagttccggcagtccaacaccccggccattttaaccgatgtgcgggaaggtatcagtgaacttggtctatgttcctatatggaggatcagcctgagatcctgctttacccggtggtccgctgcccgcttctcctgctggctcctccgggacatgctctggcccgcagagagcaggcgtcactccaggaaatcagccggtacccaatgattttttcagtcgataagactcactatatcgaaaacctgctccattctcagggcttggatcccatcatcgcctgccgtatgggggaggatcgctccatcgccaatctggtcgcctgcggctttggcctgtccgttcttccctacgatccacaactggaggcctgcggtatcgtatgggttcccatcagtgactcctgtgcctaccgtgaattctatctggcggtatcgcgcacccgcccgctctccgtccatgcacgcgatttctgccgttttatgctgaatgacgccgtacaaagcggggcgctgaagcagatgcctttccatatttaaccgtacgaaaaggcgcatccggagtattcaggcgttcgtcacagccgtcaccgcagtgttcttactatttgccgtgcattcaaaaaccaggcatcctccggattaacatacaggatatggttaattttcccaagcagcgacatcctgtacctctggattccggcttccccaaggggcagaaatctggtatcatgaattgcttccagatgagaacgaagtccaaaacgcccgcaataatgaagctcctgccgcagccgcctccggtactccttcgatagctggggcttctggtttaccacaatccccgtaacctcctgtctctgatgacaggataccgcctttgttttcttcgtattcagctcaaatcccatagcctttagaaatccgccggctttgcgtatcactgtatctgcatcgaactcacctgaaaatgacatatcgtcgcaataccggctgtagcggatccccttctccccgcaccaggctcccatatatgtgtcaaacggcttcattacaagattggatattgcggcggatgtcggcgctccctggggcagataatcacggtaacagcacagataagtcagaatcgttcccaccgacggcggaaaatagatggttggaaatgcctgttgatatacctgactgaacaggatattttcaaaaaaatctttaatatccagcttcagaagcagcttagccccgctgtgcggccgggcattgagccgtattcccgcccccttatggtatgccgttgcatatggggagaccggcatctgatcaagaatattgtgcaggatattgcgctgaatcttttttaaaagaggatcgggtaccagaagacggcggatgctcccatccctcttcctgatctcagccggatgataatgcttttctatatgattactgacagcataaaggcaggccagctgctccccgtcctccctgtcagtcctgccaagcagacgcaatgataagagaaattccctgctctgctccggcgtacaatatttccatagtcctgtattttccatacaatctctcccatgcaggaaccatacttaaaaagattcttcaatatgcgaagatgtaccggactgtggcaaagccacagaaagcacacaaagtgtgcggcgtaccttgcagcaaattgaagtctgcaggctctgcctgcgtctgactttgataaccgccggcggcgactcgccgccggcccaaagcggatgctttggctgcgctatggttcctgctgtttgatgtaatgccaatatcactatactagcatatctgcttcggattgcaagaaaaaagtatgaactgccggttattaattataaaactgccgaagtcacaacgcctatcacaaataaaggcagggagaatacaagcaccgccggaacggtcgagtcccatatatgatcgtgttgtccatccggattcagccctgatgtcggtcccaatgtcccgtcagatgccggagaacacacgtcaccaaccgctgccgccaccccgatcagactcgccgtgcccagggcagtataaccaagtgtcatacacataggcacatagatggcagagaggatgggaacggttccgaagcaggttccggttcccataacgatagtgaaaccaatcagaatcagcacggcggacgctataaatttcgatgcagacagcacatttgcagaaactgcaaccaaattttcgattccgtgcgttgccacaatcacctcggaaaagccgctggccgctaacataataaaagaaatccagccaatcattgctattccgctgttaatagtttcgtcaagctccgaatatttaaagcagcccgtaaccaccataatcaacagccctacaaggcctcctattacaagagaattgaaaatcagctgaataataaaggtagataaagcggcaaggattgcgccgatatgccgcctattcaaaacattttttccctccgctttatttcctgcatcagctcccgctataataatctccttatactccctcggttttctgtacaacaccagaacagcaaacagcagaccaagcagcattccaataccggccggaaatatcattgctttccaaatctccattgtctccatcggcattccgtatttcgtcatattgccggcaatcagatgatggaaaatcaatccgtaccccacaggcagaaacagatatggcgctctgttcccccagcagagtgcacaggcaactgcgcgcctgtcaatcttcatacgattcatcatatagataagcggcgggattaaaatcggcataaaagcaatattgacaggaattattgtaccggacaaactggagatacctgcaatgacagcgataaacaaaagtttttttccttcaaaaacacgctgcatcccatccgataaaattgacattaaccccgtttttgcaattcctactgcgatagccccaaaaggatatatgacaatgctgtctctgagtttccggccatcccattcatgaatatagtcatagtttgatcaatcggcatcccggcagcaatccctcccaccatggatgaaatgataaggactaacagaacattcagctttaacaggcaaagcacacacatcagtatgacagaaataacgactggatttctgataatatctaacatagttcccctcctaataccaggcccataagagcctgccccataagttttaagtttattttgccccgactctaatgaccccatttaccgcgtcgagagttacaaggtccccgtccttgatttcactgaagaattccggatccactttatggaccatcggaatttccattgctaccgccgccgtcaccagcaccgtgtcggccgtctccacgattaatccggccgggtgcttccccttcatcagcagcttgtaaagaccatccgcctgcaccaccgaacttccttttcccgacggcatgatgagtatctttcccgccacattctttccatttatatcgtgattgcgttcaatcagctcccctgtctcaggtaccacgagataaaagcagaccgcatctttggaaaccagagcctcggcctcggccgtcccttttgcaatttttgcgcagtgatatgtacgttccattatttaaccacctttcctgaaattgccgcctctaccgcttcttcgagcgggcggattaagaatttaattccgcggatttcattgtaataagcacatttcggagaatccgtcactcccaccgacccgtaatacggtttccagcacggaggtacatcgatgcaggtatcggctattatatggccgccggccctctggatgatgctcagatatcccattctgtccgccagctctctcgtaagggaacttgtcagcagccatgtgtctaccttgaatttccttccctcacagactttagcaattattccaacctggcggattgtgatgtgggggcacccgaacatcgcaaaatcaatcgttcccggctcattgcaaagccgctctctcgtatcctgcaaatctttatccataatcacgatttcccgtttaatctttttgcttccgacggccgcctccacggtaggggcctccggtgtgattcccgctatgtgatacatggatacgcatcccgatgtattgagctgagcgccgaaattcatgaagccctccggcgtcggcctttctttaatccctttaaaaacaggaacctcaagtcctttatatttttccggataacaccagccgagaatctggtagtcaaaatccgttttaacatccgcctggacgtcaaccaggatttccgccttgcggttctcgtcgaagagaagcccgtactccggaaccatccctgttatcgccgcacagagggcgctgttcgccccttcccggttggttcttgcgccaatcacggaattgacatatggggtcgcactggattccgagaaagcaatcacctctccataagccggaacattctgctgaagataaggcgtacagtcaaaggtaagctgcgctcccagcttccggtatgcctcattcgtggcaaacacgatattctttccctcatccggaacttcatggagatgctcattcagatatttgatgcagatgctcggattgattgtcggtggaatcttgcactttgccccttttgaaagcagcttttcggcaaaccacaggtctgcgtcctgtgcgctgagcgccacatgggttctggtcaccggaaccatcctcggtgcatcgaaggtctctccgattgccacctgaatctccatcgccatggctgcgccctccccatacttaccgttcagcacatcctgttcataatttgtgagtttcatttccttcctcctttttcaattggactattccaatattttctaaaatcaaaacaaaaataataattttattattttcttttgatttatgttgaaataatatactttttctagtctttcgtcaagtttattcagacaaacaatgggatcttaacaaatccttcgcaccattggaatggtccaatttgcctttgtatcgtataacacacatcgcagaacaattttttattaaatcacagaacgataacctgcacgctctgcgcacaggtctcatcatcaacaaaaaaagattccgtaatacatgcctgtatcacggaatcttttttatattactatttttttaactgttttatgtccgtccttatggacagaaagtctattattattgaaacatcgacagataaattactgtcccatctgcttagcaacttcctcagcaaaattctcttccttcttctcaaggccttcaccagtctcgaaacgaacgaattttttaactgcaactttagcgccgtttgctttggctacttctgctacatactgtgctactgtctgttttccgtcctcagcttttacataaacctggtcaagtaagcagatctcttttaattctttattgatacgtcctctaaccattccctcgatgatcttatcattcgcgtccggcttctcgttcttagctgctgctgtaagaatctctgtctctttctccaggtaatcagcgtcaacttcatctctgtttgtgaataatggttttaatgctgctgcctgcattgccacgttcttagccattactttcagctcgtcattaaccacgtctgtctctacgtcaactaaaacaccgatctttccgcctgcatggatataggaagcaatgaaaccgttagcctcttccacctgtgtaaatcttctgatcttcatgttctcgccgatgatggagatctgggaggaaagtgcttctgcaactgttaaggactgatccttctcccacttctcatttaagaaagcatcgatatctgccgctgttgtgttaagagcctgtgctgcaacgtctgcaacgtaggtctggaacttttcgttctttgccacgaagtctgtctcagcgttaacctctacgacaaccgccttcttctcgtcagctgataatgctgtagctacgataccttcggctgcaatacgtccggccttcttagctgcgcctgcaagtcctttttctcttaagaactctactgctttatccatgtcgccttctgttgctgcaagagctttcttgcaatccatcattccggcgcctgtcatctcacgtaattcttttaccattgctgctgtaactgctgccattttaaaatccctccgtatagttttgattatgcctgagctgcctcttctgcaacgtcttcaccttcgaatacaggagcttccgcttcgccctgtcttgcttcgataacagcgtctgccattctggaaacgattaattttacggctctgatagcatcgtcgttacccgggattacataatcaagctcttccggatcacagtttgtgtcgatgataccgattaacggaataccaagtgtatgagcttcctgtacgcagattctctctttcttaggatctactacgaagatagcatccggaactctcttcatctctttgataccgccaaggttcttctcaagtttctcccactctttcttgagtgcgataacttctttcttaggaagaacgtcgaatgttccgtcttctgccattgtctcgatctgttttaatctgccgatacggctctggatggtcttgaagtttgtaagcataccgcctaaccatctctcattaacgtagaacataccgcatctctcagcttctgtcttgatagcgtcctgagcctgtttctttgttcctacgaacaggattgtgccgccgtctgctgcgatgtctgctactgctttgtaagcttcgtcaactaaacctacagatttctgtaagtcgatgatatggataccatttctctctgtgtagatgtacggagccatcttagggttccatcttcttgtctggtgaccaaaatgtacaccagcttccagtaactgcttcattgaaataacgctcatgtttctttcctccatttggttttcttcttccgccgtcatctttgcttccgcggggactccattgattggagcaccgtccttgagaatccgtccggcgtgattttttagcctttatactatagcacaggcgacattattgtgcaagctttttacacgaattttcaaatataatgtttatttcgagaaattctcatatcttactctttcaaaacaggccaaatccctgccccgtcactcacaaaaacgacatcccggttgacggtagtataaacctgagtcccattttctttaaatgcctctcttatctcattctccggctcctgtgccgtcactactgcgtattccggctttaaagcttcgattaattcaacgccccgtttggaatttcttccatggtgggccgtcttgtatacatcgattgcgggaagatccagcttaagcagttcaccaagccgctctttttccgcatcccctgcataaaacaggtgaatatccccgtgcttcaccagcacggccagagagtaatcattggatttattataatggaacttctccggaggaaagacacggatatccagatccccataggtaaacaggcggtctctgggcatcgtttccaccgggatgcgtttctcctcaagtctggcaagcagctcctgataaagcggtttttcaccttcaaaataaggcgcaagaacctggactacgggaatctggtccagaagataggatgcaccgccgatatggtccttgtcgggatgcgtaagtatcaggcagtttattttttccactttattatctttaagaagctccagaatgtggggcgcatcttcctcctcccccgtatcaatcacaacacaggtatctccgcttagaaggatggaacagtccgcatcctctttcgtaccggcaaacagaaacttcgcctcccgcgtaacctccctgttttccagcagataccatccagccagaagcgctgcacacaatgcgcatactccggcggcccgtaataggaaaacggaaatcttacaaatatttttcatttaaatctccattccgcgcgccttcaggcgcggcacaaatagtgatgaaagattttcaaaacctctacttcatgcgataataactttcaagaagctacactacaaagcacgggaggaggagttgtaaattctttctcgttttagacagcatttaaatcagtgtaagttctgccttttcaagcacaaataagtggctctataagaccgtacactaagaattgttttaacgccttggttaatttgtgtggcagttcagtcaatggcttcttatctttttcagaaaggagtctgactatgaaagttacttacaaaacctgttgtggtgtcgatgttcacaaatcatttctcgttgccacaatcattactaccactggtggtatcgaaccttcctatcagaagaaacgttattccacctttaacaattcaattcttgaattcaagcaatggcttcttgactatgactgtcatgatctttgcatggaatccaccggtaaatactggattcctgtctttaatcttcttgaagatgaaatcaatgtcaccattgccaaccctaaatgggtaaaagctgtaaaaggcaacaaagatgatactaaagattctaaatggattggagatttattccgacttggacttgtaaaaggcagttacataccttgtaaaaagattcgtattttacgcgagttcacaaggtatcgctataagattgtttcctgccgttccagtgaaaagaatcgatatcagaatgcgcttacggtttgtaatgtcgcactggattctgttgtatccgatatctttgggaagtcatccacatccattattgactatttgcttgaacagtctggcaattctatcaatcatgaagaaatcgcttctaaacttcttaagagcctcaaatctaaagaagatgccgtgattgaatccattgaaggataccagatgactgattcccaaaaatatcgtatgcacctcgtccgtgcacatatggattatatcacagctgaaatcaatgatgtagaccgtgaaatagaaaaattgatttcttctgatcctgattttgaaaatgcgctccagtttctaatgactattccgggtgttaaacgtgacagcgcaatcactgtcatctccgaaatagggattgatatgactcagttttcaagctccaaacgtttatgttgctgggccggattaactcctggcagcaatgaatctggtggcaagaagaaatccgttcgggttacacgtgccggtgtctacctcaaacctgcattagtgcagtgtgctcatgcagccgtcaaatccgagaaatctccttactacaagaagaaatatgaatctctgatgaaacgccgtggcaagaaaagagccattgttgcaatcgcccgaatgattcttactgcaatttaccagatgttatcaactggtgaatcatggaatccaagcgatttgtataaaatcgatatacctgaagctttactggaaaaacaaaaagcaaaagccatcaagcaagccatgaaactattgcaacgcgagggattatatcctccaccagaaccaatagcttcttaattgttgttttaataaacacttataaaaagttgccacttgctgacagcttagataagtatgccacttttgggctgtcctctactttctttcacactaaacctccgtgaacactcatatcaatggctcatttaaaatttgagaatatcagcctgccaaaatccgtcaggtcattggacgtccatccgctgtatttatcacagctgcttcggatcatgctgtgcgcttcctctttattgccaagcgcccaggcggtccagctgatccggtgttctttcatataatcaatgaatggctttgcattctcctgatatgttactgcttcattatcgtactccccgctctttaggacggcttcttcctccgccgatgtcccccattcactgacaaagacgggaatcccctgtgccacaaccgattcaagcagcgcattttcacaaggtttttcctccgtaacatcaatatagcggtgcatcgtgtacatgatattatcatatttcaaaggctgctttgacggtccggtaaaatcggtacagtaattgggcgttcccaccagtatcactgcttccggagcattggctctgattacaggaatgatctgctccgcatattcgacaatatcatcccagtccgtatccccattcggctcattgcaaatctcgtaaagaattgcaggattgccgctgtagtggctgcttatctcagcgaaaaattcctttgcctcttctgcatattcattcggatcactgtcctttagaatatgccagtccactatcacatacatatccgccgccagggcgctctctattcccatatataaataattaaggctctgaacaggcgcttcaatgtatgcattctccggttccgtgtacacggcaattctctgcacattcgctccatactccgccaatgtcttcatcgcgctgccgtttaaataccggggataccatgttattccatggctgctggttccgcgcaggaccatgggactgccctgctcatccgtcagaaccgggccatttacgtgaagagcgccgtgggcgctgactcccgcccccgcagttttttcctccgtatcatctgaaaagccgcagccggccagtcccgcaatggcggctatactgccaagaaacaatatgcgtcttaaatatctcatggtttattctccattccaaaaggaaatgcctgcccgctcagattttcgggataaagagccagcagcacataatcgtaatgatttttttccagaaactttgatagcttttcctcatccgtctgaagcgtccataacatatcaacctgtgaaaaagactgggccagaaaagctccgaccggcgttgcgtaggaatctctgagcagaagaatcttcggtccggaatccatttcgagatttcggattgagacgtattcatccactccattgtgaagatagacacgctctgcctttccattatagacattctcaagccctgggccattctcctccaaatctaaaagcgcatccttaaagcttccctgatacgttttatattcccctgtcattccccgtttcagagaatactcaccaggtgtttttggataaatcaccgtataatcctcggttcctccggcataaatcagccccgtctcccgcccctgggaacccagcatataccccggaagcgttacctgttcatattgagcaagatccttaagcttaccgtccggatccagggaaactccgaacgactgctccatccactgaagaatatttttgtatccttcaaaagctgccctgggtgtccagtggtgatccgttcggaaaaatgcctcctgctgcgtaagcccgtttgtctcacaaagagtttccaaatccaggaggggaaccttataataccggagccatgccgcgaaatctcccgccacctccgtataatcattgtaaggcaatccataatagccttccttttcttccggcactttcatcgggaaaatcacggcgcccatctttgtcccgcggacgctcagttcatcctgcagcctccgggttctgacagccagttccttctgatcatccccaaagccgttccagaaattcgctccgtagagcatcccgtcttttcctttcaaattggtaaaagcgttttcttccttctttcccataagcacctgaagagcgccgtaaccttcaatcagaggatagcgaaaaagcagctcttcgctcatctcctcctctatcccccttaccgcctgtttgggattgtgccatccctccctgttttctttgatctcttccagcagtacagggccatgaaagaatatgttaaatcctgaaaataagaacagggatattataaacagcacagaaaaaatatgttttcctttttttacgtcttcttccatacctctcctttcttaaatcagaaattaaagtaaataaaaggattgtatccgctcttggatatataaagcacagctgccgcaaatacggtcatcatcccggccggatacaccacccatgccagtttcggataccgtttgaacaggcgtgtgcctgccgtctttgcagcaggcgtgcacagtaggattccaattccccactgccatgcatattccttcagaaacatccaggtatacggactgaaaaatccgttttggttcatccagaacatatttcccatatactccttaagctggtaaaagctttcacacctaaacagcacccagccgagattaaccgccagaaggacgtacagatgtctccaggccgtttttccctctcttttctcgaactcgaacaggcgctccaataccaggaatgcaaaattgagcagtccccaaaacagaaaattccacgctgccccatgccacatgcccgttaaaatccatacaatcagcatgttgtggatcagcctgctcttgctgtccacccgtgaacctcccagcggtatatagacgtattccctgaaccaggcgcccagtgaaatatgccaccgtctccagaattcccctatggagcgggaaatgtaaggataggaaaagttctcttcgaaacggaagccgaacattctgccaaggccgattgccatatccgaataggcggaaaagtcaaaaaagatttgaagcgtataggcaaaagatcccagccatgcgagagtcacagggactgccatgaacctgtgccccgcattagtcatcgagaatatgttatctgctatcaccgcaaaggagtttgccagaatcagctttttcgccagcccctgtacaaagcgcacacatcctgaagaaaataaatcccatgtgtgggtccggtgatgtatctgctgctccaccgtgcagtaccggacaatcggccctgcgacaagctgcggaaaaaatgagatatacaaagtcacattcagcaaatttttctgaaccggagcggtacggcggtaaacatcaatcacatagctgagcgcctgaaacgtaaaaaacgaaattccaatcggaagtgcaagcggcaacgtaagcccggttccaaatcccaggatatcatccaaaacagatatcacaaagttccaatatttaaacagaaacaagattcccagattgcctgcgcacccaatcaccagccatattctgtctgcatttctccatttggaaagcgccagggcaaccgcccagttaaaaacgcaggatccgattaaaagcaggatataataaggctctccccatccataaaagaacaggctggccgccaggagaaagatatttcttagcctgatactgaacctgcataccgtatagtacaaaagcagcacgattggcaggaaataaaataaaaatgcaatactggagaaaaccaaaattgtttacctctttcaactaactttattttcttttgcttccgacagggcaaataactgttcaaacgcatcgcaaaaaagcagttctttccagttatccagataatacagtccggccttttggcctgtctttacacatttcattactgtttccgtacccggaatccgaagctccatcttatccggaagctctcccgaagcttcaaccaggagatattcataattgcagttaagcacccggatgcttttcccgtccgcagtctccatcgtccggttcagttcaatcctcggaagctggcgttttgaattttttgtgtgtgcggaacgtctctggacattcaggaatatatcatcaatcatgctcaccgacggactcatcgtctttgccagactgtgatcgcggtcatacagaatctggaagtattcgtccttatccgttccatccatgccggtaatttggattccgtacttccatttatcccccttcttctgcacatggacgcattttgcatccagtttggctttatatcgatccgttttgatttttatgctcatctgctcttccccatggggcatgtagatggatttatcacacagcaccgcaagtcctgtctcggaaaaatcgcaggtcagtccgtaatattgttttccctgatatgaaatctcgaccggaacctcggcataaaagcggtccgtagtccgcagattacggcgcccggacatgaaaaacagtgccataatcagatgctgggcgtttagaacaagccaatagataataacggccgccccgtagttttgtgtccgcagcgcgccggccactgccataaccagcgccaccgcgtcaaataccagcagaatcatctgcggaattgccagcatgatatctgaccttctgacgatatcgcgcctcttgctggtgacattgaattttttttgccggatgaacagagtttccagcagaaccgggattatcatatagggaaaaataaccgtatccacagtattgctccaccgcttattcctgattgctcctgatgtcaccttcagcgcctggttatacaggacataggagggcagccagataaaaatcaattctttcagactgcagataacgaccggaatgccaaacaatatgaataatataggtgaaacaatataaataaaccttctgaaaaaggtccaccagtacatccagcatgccagatagctgattttggcattcagttttatatggggattaaacagcagattcgtgcggcgcagtgaggtaatacatccgcggccccagcgcacgcgctgcttaatcagattatcaatatcggtgggcgccagtccgtgggccaatgtcttgtctaccgcataacagctgtatccctttgcctgtatcttaattcctgtctcgaagtcttccgtaattgtcccggttgcgatgcctcccaccgcttccagggcctccctggatatcagtgtattggagcctgcataaataggggcgttcgcattgttccgtcccacattgatctcgcggaagaagaagtcctgttcattggggattctcgattcgctgaagaaattgtactggaacatatcgggattataaaagctctggggagtctgtataaaaccgatcttgtacttttcattcttctcctcctctgtacgttcctcccaggaaccgtctttcttttttttcatacggggaaggaaaatataggggactgtctccattaaaaaattgtgggtcggtatcatatccgagtcaaatgtgacaatccagggcgatgtagttttgccaatggcgtggtttagattgccggcctttgcctctttattgtccgccaggccgaaatatcccacccgcatttttttcgccagctccgccatttcggggcggtttccgtcgtcgcaaatataaatatgcaccttacttttgtccggataatccatatggcggcagccgttcactgttttataaagaagctccgtctcctcattatgcgttgcaatcaaaatatccacatcgggataccagccgaaaggcacaaccggcatatccggttctgatttttttcccagtctggcaaaatgctcggtaccctccagcatggaaatcgtctctgagactgccaggcagataccgcagattgtggcaagccatccataaacattgtgatccggaattgtgaagaaaagacgccagcctatatagacagccatgctgataagggctatcacaatccatactttttcttttgttcccttcttctcctgcttcgctatcttaatcttttttcccatctttaccaccttctatcgaagaccttcccttgctctctgtaccagaataattgacacaaaaaatgcgatgatgaataatatgcctaaaccgctgttccgccttttctgtccatcccatggtacgtaaatatcatacaaatgctgatccagatacgatgcgtgcagggcggcaaaatcgatgattcgttgaacctccccctgtgcattgccacagtccctttgtaccaatagccctgtacttttttcaactacctcatccaaagaagaagcttcatattccgtcctccatcgtacagaatctctttctatcgcgtttcccaggaatttcagcccttccgttgccttttccttaacgttttcgtccgacaaaatgccttttcgcagctctttgtaccggtcgcaaagcttatttacaaacacaggatcctgaatcatacattcaaaccatggcctttgcttcatcactatataattataatcggttaaggtatgcgaaccgttatccagggctccgtcaaaatcccaaaccggtcccatctttattttcccgcctatatccttgtaaaaataggtagaatgcagccctgcatcgtaactggtcagatactcgttgattataaaataatcacaaaaggattccatatcaatcatctgcctatattgaataaattccatccagtcatcggaatacagagctttttccagttctgttatttcatccgaaattttctgtatcgactgccctgttattttatctttatttggataaaccaggctcagtaccgcatcattatcccattccaattcccagtcctgtcttttgtccgggaagttatccaagtatgaaggaattgataaagcagaagcgtcataccgatcgcgtttcaaaagatagggcaccgcagcattccccggagaataacggctgagttccacccttcctgtaccacgctctatcggttccatcatcatatacaaaccgtcatagcggtatgtgccgcctttttttatgataacctcgcaatatctcaaatcgggcgtatagggctgcatttccccatcaaattcatagccagataggttcttaagtaagagcgatccgtctgggtcccgtttaaaatccagtcatccgaagcttccatacccaaaagcggctggccggatttttcaccttcttcatcaagcagcttgattcggtactgatgctttggaagcaatgcggagtgattgcctcttacttttatttttccagacgatgtgattgcaggctgttctccaatacggttaattgaattctgattgtctataactgaaatttgtatcttcgtataaacatcaacgccctccggatataacatggcatctgtttctttatcataatatttataattcacaatctcctctccacccgtatcgatgataacaaggggcaggtgtgaggtgaagctttcgtccaccatataatcctcaggaattgtatcactgcccagcgtcggatccgcgcctgctgccagctcatgatgccaaatccggtcttcctttttatcgacctcctggtatttccagaaaccgaacacagcacaaaccgatatcccgaacagaattatggcagtcgccgctttccattttgcgcccattttaaatcactctttctttttccctgtcttttttcatccggctcatcctttgccttatgacgaaatctcatcattctgccccacaagattcacttccgtcaccttttccagttccagaagcttccggctcagcttttcattctgccagacctgcacctgcttctccgacagttcatagatatattccacaatgtcccttccctggttcttaacacagaggcgggcctttccttttaacggttcctgaatggaggtctcaacttcttccgataatcccccaaggccgcggacaatgagcagatatctcgtattggcgcgcactccgccgattgccagcataagcaggaatatggtaacgcttccgatggatgccgtaacaaaatcagaaattccgcagcagattcccactgcgatacaccagaaaatataggctgcatccctggcatctttaatcgccgtacggaacctcacaatcgacaaagcgccgaccatgccaagtgacagcgccacattattgccgattacacacattaccatcgttgtgacaatggtaagcatccaaagcgatacattaaagcggccgttataaacagctcccgagtgtgaaaaacggtatgacaaaaatataataaaacctatcaccagagcgctgaaaaaattaatcagaagctcctgcacactcaggctgcccgcatggtttgttatgtaatataaaagatcctcattcatgacatagttcctcctaatccaaaatatctcgatgccgtatatttgctgcttgccgtctccgtcagttcgaaagatgaaagcgccgttctgatataatcaagcaggaaatgattatatttcacttccagtgtaatccgtcccggttccgtgaccgggtaatatgacacggaatcctgaaacaggttaaactgcccttcctgcgccgatacgccgctgtccaatgtaatcctgatatcattggtcggaaccgtaaatgccagcctgctgtacttgacaatgcatttgggccggtagacctcctccgtcatcatcgcgtaaaactgctttggaagatccccgtcatagtccagcagacaccggtaatctccccttatcagcttttctgcatccgtctttgaaaggagcagactctgctttctctgtttggagccctgcttccgcttccattccagctttacgataccgccgtccccatagctcctcaggcggattttctttctgaattctaatccgctgcccttttccatatagtccctattgtacaatgaatcaaaatataatgatttaacaatatatggtttggcattttcacagtttccatcgagcggaagcaaatatgacagcctggccgttatctggcctgccgtgagaggggaaaccgtgtactttttttccgtacgcagaacatccaggaattccgacattgcctaaaccttcctttcaataaattaattatgtcaaattactataccaaattgtaacgatgatgtaaagttcccgtaaattattatttcaattgttactataaattgggatatttgtttcctgaaccggtggagggcatgaattctcaaacttataatagaaaaaaggcggcaaagaatattttgccgcctgtaccaatcacttatttacttgaaaaaattatggtggatttctgttattcctcttccttttcctggtacagatagagccaaggcgcttccacctgaaggttcccgaactcgtttctgccgtactcttccctctttcttccttttcccacccggatcagccggtcggcgagagccagggaatcggcaaggttaaccgccagtatcaccacggctatccctttatccagaaaccgttccagaagttcccaaacatggatgcggattgagacctccgctcttttaaacggctgtacgcagaaaacgactttaggattctgcacaagaattctcatatagatcagatcatacttttgtttgtgtgacagctcctccactctcaggtcaaagacttcttcaccgaggagttccgcatattcctgccgcaggctttttttaatcttattcgtgagccatacgtcatgaaagcggtggtcgagtgtaaagcagaggttatccagatagcttaaattggagaacagcattgtctgcaccggcacctcctggattatggcaattctgcggtccggtttctgcctgaactccacatctcctatcctgatatgtccctgctctgcctttttttcccctgacagcaccatcagcagatccggaaggaaacggttatctaaatcctgaaggacaagacattcccccggcgctacactaaagctcaaatgcttcacctctccgaagcataaatcctctgccagaaaagctgtctcctgtttcagcggtttccccgcttttttggcaatctgttcgctgacgcgtctgtcaaagccctcggaccagcggtacatataagtgtcgggcacatgctccgataaaagaaagtatttgattatctgtccatccttcatcaccgccgtacggtcgcatatctgctttacctcttcatagtgaggcgcaatataaagaaacgccattcccttgtctgcataatgacggagaatccggtgaagcttctgcagctccatatcactgagaaaggagctgatatcatccaggacaacaaggtaattccctgccacaaccgcctttaaaagctccacgacaaaacgctcaaagggggacagctcctcaatgcaggcatcggcgtcaatgtccatctctatatcctccagaaacggcagaagctgctgccggaggattttcggctgcatcaggcgtttccggaagccggggcgcagcacaaaaatattgtcggccaccgtcagcccctccgccagacagcttttgttctgaattacgctgatccggttcatcgaagagtcggaataccgccagtggttcacctgcttttcatggtaataaacgtacccgtaatgaagcggcagattctgtctgagaagtttgataagagcggagattccatgacggttcacaggcatcagtcccataatctcaccggcccagatagacatgctgaaattctccagctgtgttactccctgttcccggtaagtgacacgctccattctcaatgtttcttctctcattttaatgcctctttatttttgatgtccctgtcgcttgtaattgcgggaagagaaatttccacatccgtacctattccgggcatggaaaatacatggagtccgtattcttcgccaaacagaagatggattctgttattaacatttacaagggcaatccctcccttggtttccgtattctgtgaggcaaaggccctgccgctcttctccagcctctcattcatcctggccagcgatgcctcgtccattccgaccccgtcatctgagatgcggatcagcagccgcttgccgctgcgctccagccggatggtgaggtgcccgcttccgattttacactccgtaccgtggataatactgttttccaggattggctgcatcgtaagcttaggtaggcggcagcagtatatctcgtctctgtcgtcgggatcgcactctatcgaaaggctcaggcgtgttccgaaccggtactgctggattctgaaatatgtttcacagttctggatttcttcctccaccgacaccagattttcgaccttgctgattgtataacggaaaaatgtggcaagggcctcggtcatctccgccacactgcccagtcctgcaatcagcgcttcactccggatactctcaagcgtgttataaagaaaatgggggttaatctgattttgcagcgccaggtactgtgcctgccgtttgttcagcttcagcagctcagaagaatccatcatatcattcatacgctcaaggaggcggtatccggccggggtaggggtcacgtcatacagatccgaaatttccatcgtcgtatagccgtccgtaaacagccgcatcattttctcaaaccgcagatacggcttcaccacaaagtaaaaagaggctccgattatcccgagaaaggccgtaagtcccaggaaaaacggccaaagactgccctcctcgaagataatcatcttcaggcagaaaagaagtaaaaacagaatcagcagcgcagccgctgcagacagcaaaaaaactctgtgtgacagatactctgtgttcttcctatccaaatcctgttccctcctctgtctgatttactgcagtccggctatccgtacagctttctgtactccgcagggtttaaaccggccgttttgtggaatgtatgggtaaaatgcttgcggtcgctgtaccctactctctcacaaacttccgcgaccggaagatttgtctccctcagcagccgttttgcctcatccatcctgacgcgtgtcagatatttagcaaatccttcccctgtctcttttttgaagagaacgctgaaataactgacgctgaaaccggccgcctcgcagacgtcttccagggtaatcggctcatgaaaatgctgcattacgtattgttttgccagtctgacgggacggcccgcctcgctttttctcagctccccggtctcacgcagcaaaagctcctgaagctcctgaagctgtgcgaacagttcctccacccggcagcactggcggcagcggtattcaaaatcctttttcattccttccacgtttccgacggcacatctggcgataaaaaggtggcccgccgcaagcgccagctcataaatctccctgccgcagatcccgtgggtttcaatggccgattgcctgagcatcatgcaggctgaggctgcctcctccagactgaaggtttcaatggcatgttccgtcgcctttacatatttatccagaagattctgcttctctattcccgaacctacgggagtggcctccagaagccgccccggtccctccacaaggcgttccagcaccgcgcctctggcttcctcaagcgaagtaacaagacggccgcattctctcaccgccgttcccagagaaagtgtaaattctacaggcccgtacaggttctttttggcgtccagcaggttcaggcattctctcaggtgccttctcacttctccccttttagacgattcataatttaaaatgccgtagcccgtataatcctgaaagtaaagatggtattcggggcaaacctccgacagcccgttttcaaatatctccctcgccttctcccgcaaaagctcatagggagagccgccgaccttcctcacatcacagtctattttcagcagaaaaacctgataggcgtctccctgtatctgaaaatggtatgtatcgtgaaggatttcctccgtcaattccgggggattgggcgacaacaggtcttttacaaggctgctgcggaggcgtctcagatccttctggctgttctgatggcgctgcgccatcccttcctctttatcaaaccgggcctcacagcgctccttcatcttccggagcgtatccatcagctcttcttttttaatcggtttcagtaaataattgcctacaccaaactggatcgcgctctgtgcatattcaaaatgagcataaccgctgataatcacaacttcaagctgcggtctcagttccttggcccgccggattaattcaaggccgtcgcatcccggcatcctgatatccgtgatcagaatatcaggctccagagcctccaccagctgaagagcctccaggccgttttccgcagtgcctgccacctccattcccagtgagtcccaatcggccagggcctgaacaagccggcagatcagcttctcatcgtccgctataattactcttatcatacttggcccctccccatatctgttcctgctgccatacgcatacggctggcttcgcgggcgtgtacctggcgcagatagatggtgctatatcacaggaatttacacagcgctgcactggtacgcctatgcattaccggtgcaaagatgcataagaaccgcctcctcagacgggatactgggaattcctcccgtcacctgggttgaaagactggccgcggtggatgcaaacgccgcaatagccgccagctcttccaccgtcaggcagtcaggctctttcccagttttcagaagacgcgccacggcgcttcctccaaaaatatcgcctgcaccggttgtatcgatcggtttcacaggcgggcatactgcccgcgccccgccgtttctgttggccagatacgcccccttaggccccagcgtaatcattgccagcctgacaccatattcattgagcagcttgccggcagcctctgtttcatctgtgattccccataagaattcgacttcatcatcgcttattttaaccacatccgccctggacagtccccacagtatctgttctctggcttcctcccgggatttccagagagggggccgcagattagggtcaaatgtaatcatctttcccttttcccgtgcataggcgactgccttctgcgtcgtcgtacggaccggttcatccgtcagactcagcgtaccgaagtgaaagaccccggctccatcaatcaggcttaaatccagctctccgaataaaagcctggtatcagcccccggtttccttgcaaagctgaaggagcggtccccttcagggctgaaagtgacgaaagccagagtggtgaacacggtatcatccgtcacgatcccctttgtctcaactcccgcatcggcaagagtccgtacaagaagcgttccgaatgcatcgccgccaacttttcccaaaaatgcggtccttgcaccgtaagcattcagcgccgccagaaaattccccggcgccccgcccggattggccttcatcgtcgggtatcctgccgaatctgaagaaagcgccgcaaaatcgattaaaagttctccaattgccgttacatcatacatgatattcccccatccgtcccgtaatcttgttcactcatcaaatttctgcactcttcctcaagcgcctcaatctcccggcttccttcggcgatacagaaacgtatctcattaatatgcttttcaaaaggagccagcagcctggttctgcccgcccttccgtcaaatccgcagttggccggctcgagcgccattgcatagtcgccggaagcgcagctcttccactgagccataagcggaatcttcttaacgttccatctgatacataaagccagctccctgtcatcatttacaaatgctccgaatgtattgccttcacgatccgacgccagactgtactggaacacctgctccgcctgtccgtcctccgcctgtcccatggaaagccggccggccattcctttttgcgcttccccgtctctcggaatacaggaaacttccgggagaatcagtctgctttccggcgtcagaaaaggatagccggcattgcagtgatataaaaagcataaaggctccggtttaaagccctgattttcaatctcatcatgaaacagaatctcattggagccatataccgtctccaccgtccttctgaggatcatgttttccccaaaaatttcagcctgacgcatctcacccgtcacgcggattctgtattgatccccgtcaaaaaatgaatccatgccaatcttttcagcgggagttgtcctgattcttccatgcgtcggatactccaccccgccaaccgtcctgtacccatggacatgatccaggccgcaggtaaacattgctccgcccataatggaacgtaccgcctccctgcctgccgtatcatagggattcctcccctgaagccccggctttgacagaaagctcatattaagccctttataacggatccaggccggatccagacatttatcaagcatcagcaaaaactccagcggcccgttctgtaccagggcgcacctgagtccggaggctcttccatcctggtattcaatccggcgcacccctgccgcctgttccaggctgccgcagaagcgcagcaattccttcttgtcagccattcagctattccttcccctgttattttgctgccggatattccgtgcagagcagacggtagggagcttcgtcctcttcgattttcgggaaacggcccatctcctcataaaaacggttatccgtattatcatcgttgcactggcttacctctcccagaaggacagcccccgttcctttttccacttcaaaatcgtgatacatataaggataaatcgtgatactctcccccggagtcaggcgcacctgcgtaccggccggaaccacaagctctctgccgtcaatatgcacatggacgtcattcattttgtccagatcttcttccggtgtcgaattatagacgcggatcagaacattgccgccgcccctgttaatgatatcttccatcttagaccagtggaaatgcatcggagaatactgcccgtccctgatatacagcagcttctctgcataggtctttgtatatttgccgttcattttcaggtttccgttgcggatggtaatcaaagaaaagcctgtcttttcaaaattccccaggccgtaatccgtgatatcccatcccagcatgttgtcacggatttcatcgtaatcatgtcccttctcctcccactcctgcggtgtgaagctgcagaaaggcggaactgcaaagcggtactccttcaccatttcttccatctcttttaatgctgcattaatctcactgcgtttcatcgttaacccctcctttttttaatcatatcatgtacgatattacaattcaacaaaaacgccgagcctgaggtccggcgttttattattactgttcacacggttgtgtactgttattttttaagtacggaaacacctgtatccttaacctcgccgccgagggaatttccttcaagcgcctgtacacaggcctctacacccatggaacccattacgtctggattctgtgccattgtgcaaagtaaatatccgtcgtcgattaagccgagtatggcatcggatttatcaaaacctactccgataattccgtcttttcctgccgccttaatggcatttcccgctcctgttgtggaaccttcgttacagccgaagataccgactacgccctgggtgatatagttttccgcgatactctgggatttggccgcatcaccttcgccgtactgtgtttcaaggatggtgtagccttttccttcaaatgcggagcggaatccctcttcacgcatgacgcaggaatcagttgccgcatttacattgattacaccgatggaaccggaggttacgcctgccgcttcaagagcttttaacatctcttcgcctgccgtttttccggcagctttgttatcggtggagaatgttgcctcagcctctacattggccggtgagtcaacatagacaattttcacgcctgctgcctcagcctcttttaatgcagaggagatggcatccgggccgtttgccgcaaccatgattgcgttgtaaccgcctgccactgcgttgttcacacactcaatctgctgtgcgtcgtccttggtgttcggggacatgaatgtaacggtaacgccgagttctgccgccttagcctgtgcgccttcattcagggttacccagtgctggtcgatggaatccattgtgatcagagcgattttccactccttgcttgctttcgccggagctgctgccgctgcgcctgctgctcccgccgtcagcacggatacgcctgtatcagttacttttccgccaaggctctcgccgcctatagccgctaccgctgctttaacgccttcatatcccataacgtccgggttctgtgccattgtgcagagtaaatatccgtcgtcgattaagcccatgatggcatcggatttatcgaagcccacgccgatgatgccttcttttccggaagctttgatggcatttcccgctcctgttgtggaaccttcgttacagccgaagatgccgactacgccctgggtgatatagttttccgcgatactctgggatttggccgcatcaccttcgccgtactgtgtttcaaggatggtgtagccttttccttcaaatgcggagcggaatccctcttcacgcatgacgcaggaatcagttgccgcatttacattgattacaccgatggaaccggaggttacgcctgccgcttcaagagcttttaacatctcttcacctgccgtttttccggcagctttattatcggtggagaatgttgcctcagcctctacattggccggtgagtcaacatagacaattttcacgcctgacgatgctgcttccttcagagcggaggaaatggcatccggaccgtttgccgctacgataattgcctttgctcctgccgatacggcgttgtttacacactcgatctgctgtgcgtcgtcctttgtattgggagccataaactgaactgttacgcccagttcctttgccgccttctgcgcgccctcattcagggttacccagtgctggtcgatagagtccatcgtaatcagtgcgatgagttctcctgaacctgactctgccgccttctccgtcgtggctgcacttccagtttctgctgtctgtgaagtttcctttttgccgcagcctgccagtgccgtgacaaccatacaggatacacagaaaagagccgcgagcttcttcatttttttcatgtaacttcctccttttttgcagtcccctcagcccggaccttccgggccttttaaccgcatttttcattttatcttagcgcctgtaacggcggctaattcaataccttctgcctgtaaccgttcagatatcataaactgttacttctgcctggctttttcaaatccagccgtttagctggtgcgttttttcttaaagagtccttttcggaataccacatccagaagtacggcgaataccacgatgataccaatgacaagacgctgaataccaacctgtacgccaatcatgttcagtccgttttccagtgtctgccatacggaagctcccgccagcgtgccgagaaggattccggtgccgcccagaggggagataccgccgataacgcctgccgcaaccgcatacatttcgtacatgtttcctgcttccatattacccatgttagcctggccgcagaggattaagccaaccacgaaggaacagaacgcgctgacaagatatgttttggtaatcgttgccacgacgcttacaccggaaagctttgccgcttcaacgtttgagccgaccgcgtaaatatgacgccctgttctcgtcttggagagcaggaagaaaaagataataaataagacgattgctatccagaacgtattgtatacgcccgccgtctttccatagtagaagaaattctggaatttatctgccgcttccttgccgataccggagctgatagcgtccgtgtttctgttgccgttaaccatatatgccacgcctctggctacgaacatggttcccagcgttgcgataaacggaggaagctggaatttaccgaccagaataccgttgataacgccgattaccaggcagcaggcaagggtgatcagaatggctaccgccggggtcacgccgtgggtcatcagcgtcgccgagatcattgcgctcatgccgaccacggaaccgatggaaaggtcgatatttcctgtaatcaatatgtagctctggccgataccgataatcaggtatttagacatggaacgcagaaggttcatcacgttctgtcctgaaaatacggtcgggttaataataccgaatgcaatatatattacgattagtccggcaaatgccgtcaatgcccgcgcattccgcggacacccagtattctcttcaccggattttgttttgtctgattcattttttctcccccttatcactcaccgctggcaatctttttctcaaactgcgttgccagtgtcaatatctgattctgtgttgcttcttccgctgccagctctccggtaatgcggccgtcgcacataacgataatccggtcagcaattcccataacctccggcatttcagatgaaacgaacataactgcgatcccctgctgctttaattcattcatcaggttatagatttctactttggcagccacatcgattcctctggtcggctcgtcgaaaataacgaccctggagttacgtgccagccattttcccacaacgaccttctgctggtttccgcctgagagattaccggcctccacttccaccgtaggcgtcttaaccttcaggttctccacgacgcgatcgcacatctcatgctccttttggctgctgacaacgcccagtttattacaaagcaaatccagattcgggagagcaatattgtggcggatactcagctttgtacacagcccgtctttctttctgtcctccggcgccagcacgattcctgccttgattgcatcctccggtttattaatcgatacttctttaccgtccagcactatcacgccgctttccttttgatccacgccgaatatcgctcttgtcgtctcggtccgcccggcgcccatcagtccggcaaagccgacaatctcgccttcatagagggaaaatcccacgttcctgaccagtcttccggcatttaaattctttacctccagaaccagttttcccttctcacattccactctcgggaacttttcttttatctcgcggcctaccatgttggcgataatctcgtccatcgtggcatctttaaaattcatcgaagtgatgtactgtccgtcacgcatgatggtaactctgtccacaatgtgctggagttcctccagcctgtgtgagatatatacgattccgcagccttttgatttcaaatcccggataatccggaataaatcttctatctccctggctgtcagcgccgacgtcggctcatccatgatcaggatcctggcgttggtggagagcgctttcgcaatctctaccatctgctgcatggatacgggaagatcccccaccacctgctgcggccgcaaatcaattttcagctcatccagaattctctgcgcttccgcctccatctcggaatttgaaagcatgatcccttttttcttctctcttccgagaaacatgttctccgctaccgagaggtggcggcacatatttaattcctgatggataatcgccactccgacttcctgcgcctgttttggactgagatcgccgtattccttgccgaaaatagccatgcttccttcatcccttgtataaacaccgctcaggattttcatcagcgtgcttttccctgctccattttcccccagcagcgccataacttcaccggaacgaagctcaaaatggacatgatcgagcgctttaactcccggaaagcttttactgatactatccattgaaacaattgtctcattcattttctgacacctgtctttcccctttttctaccctgcttttttcttcgttatggttctattatatcaaagggggtttgtacaaataagggggtaaagattgttcttatagggggttttttatgcattttgacaatggggtttaaagaacggaacgctttgtaccggcaaattgctgtatgattcagaatggagatttagttaagcaggtgaggacgccgccggtacggccagcggacggggtggtggggtgtgtatatgagtctttcgtcccgggaagattgttgtgagttgggactgcgggcgaagataaagtctgcggagcacgctcccgctctgtgaaatgcatcgcgctgctaagctcgtatgggacctcgctaatcagcgatggatttcaacggcatccgcagactttatcttcccctccgccccaagggaaggttatcgccgggatgaaagactccgccgggggtatcggccccgtccactggcctgcggccgctgatagtctcacgcgttaagtgcggggcggaccttgtcgcggccactcagcgcttccgtgtgcgggaaatacgataagccttcaatgcgcctttattaaggaattgcggaatgtttgatatcagtttgccggaaacacgtagtggccgcgacaggggcctccccatttaaggttagagacaatcagcggccggaacggaccatgtccggtgccgcgaaaacctccgcctgagtcttccgtccccggcgaaactctgcccaggggaagtaggcgaaatcaattgcggaggggacatgggagtccgccggtgcttggcgaggtccctcacgagcttagcactgctgcgcactccaaagagtgcaaacggtccccgcagcaattcattccggccggattcccctccacgaccaacttcccacggggacggaagactcagccagccccctcaccacaccggacatggtccgttccggacgcgtcctccacacctcagttaaatctccatactgtgcatattcatgatataataataccggaaacccgcaggcaggggtatgccaaatatttataacattaatttaggaggttgatttatgacaggcaatactgatgaaatgaaacgatttatggaacggctggagaagtccaatgccggacaggaaaaatatgctaagctgcaatacaggatgagccagcttactgcggctgccagtatccttattctctgtattgtcctctatacggcggcaaccgttattccgagggttaacacactgtttaatgatattcaggcttccgtatccaatatacagaagatatctaaggatctgtccgatgccaatcttcccgaaatgattgataatatggaccgtcttgtcacaaccagcgaatccagcatcgagacagcggtggaaaagcttaattccattgattttgattcgttaaacagcgcgatccgcgatctggctaatattgtaagacctctcggaaagctgttcggaggctgactcagtcctctgcctttatggcagagagaaaacaggccaatccggatacggaaatatccggattggcctgttttcagagtcctgtattttacgggcggtgagccggtatcagtcaccctggaaataaattgcttttacatatccttttgaatccctttcaaggatgtttccataatagggctgaggaccatatggcccttcttcattaaaatccataacccggtaattccccggtgattcaacgatactctcccgcggcatatcaaaatatccgtaatattcctcgcaggctcctttcagaacataaactacgccctgataaacccttttaaacctggtgtccgcactgtttgcccagaagctatacaggccgctgtcaggattatacgtgctcataacgtaatctccctctgcttcgtcaccgaatacatactctccatattccggcgtctctgccttctttaaagtttttttctcacctgtcagctcatccgttaccagttccagctccgctccgccgtccagcgctttatactgctccgccgtcaatgtaatcggaactgagatcgttccctccgccgcataatataatcctttatcaaccgcgtgttctttatcggaagccagttctacctcaatctcgccatactcgggaagcagttcaaggtatggcgcaggctccaaggcatcgtattctttttttgccattgcagcctgaccggcatcatacttctcttcagcatcatttaaaaaagcaatattcctttttatgagacctccgaggagcgcttcatcaaactgtcctgcttctgtgtttcccctgtaccacggctccgcctcaaaatattcaatcagatcagcgctttgaaatttcctgccgtatactgcataaaactgattccgtatgatacgcaggtcttccctgctcattccaagcaaatccgtgtcattcagaggccttcgaaatccttccggcaatttcagattatcattatatgagtagtaaatccctgcgtcttccccgtctcccccagggaaaccgtcccgtcccggttcaagctaagcagacagaaattcccccgcctccggacatctcatcttccagattataggtatcaactcccgcctcatatggaagttgatactccgcaagccctgtgaccgcgttggagcgctctgcatctgctccttccatgctgcgcttgtatactgtgatacttaaattatcccgttcctctgcttctcccggaatgacagacagtctgtatctgaaatccccggctttgaaataagagccgcaaaactgctcccactctttgttttccggcgcttctgaagtcggagcttctgttttcatgccgctctccgtctctttatcaccgctgtcttcccttttattgccggcatcttcttgcgttttcccggtatccgggaggccggtttcttcctcaccccgtccgggcgaacaggcggtaagcgataataccgcaagcagtatcagcatacatttaatactctgtttcacaaaaatcccccctagcctttattttccagcagtttcctcagcttctgcatcagtgtctttttttctgtcccttttgatatcaggtattgtttttccgcttctttcatagccttatccgggttataccggggcgcaggtgtgcgggaaggtgttctgccgtgtgttgattcaaactccttcaggcctgcattcaaatcggtccttgttttctgttcccacccgctatacatatttcctcctctcagcacatctttttttaattttaccataagcataatttccattccatttatttgaccggtcaaaatcattgcgtttttcttacaatataattttgcagttatatttcttctcaatagggatatagataattctgtgctgttaaaaccttgttataaggttccggcaggattgacagcaaaatagaggatcattataatggtataaaactacggcctcagttagaggctgatagaaacaagggagataagaatattatggcagatttaatttatgaagtaaaagaccatttggcccgcattacgatgaaccggccggagcatcttaactgtttcagcgaggaaatgatccgcctgtggacagcagcgctggaggatatccgagatcgggatgatatttatgcagttctcctttccggaaacggtaaggcattctgcgcaggcggcgatgttaaagccatggccgcaggggacggtttctttgaaagccatgatgatattacctccactgctctcgcacggaaaaattcactctggaagggaattcagcgtattccgctcattctggaggaaattgataagccggtgattgcaaagatacatggagctgccgtcggcgccggactggatatggcgctgatgtgtgatgtacggattgcatcggatacggcgacgctgtctgaaagctatttcaacgccgggatcgtgcccggagacggaggcgcatttttcctgccccggctggtcggacgcgacaaagctctggatatgttctggactgcccgggtattaaaaggcgaggaggcggaacgcatcggactggtaacccgtaccgtagctgccgatcaactggatgattatgtggaaaactatatgcataagcttcttgaagctccgcagcaggccatgcgcctgaccaaacgcgcgatttaccagagtgaacagagtactctgcgttcttctctggatatggtatcctcttttatggggattgtgaccgaactggatgattaccgcacgcgtacggctgccctggttgagcggttgaataaaaaatcggataaaaaatgataaaacggggaaccgaagcttttgctttacggttccccgaaatttttcacggaggcttgcttactttactatatgaaaaggaatcagtatggtgaattgtgaaagttttctattatagaatgaattactcataaaaacgcccaaaatctcaaaaataggccaatcttatacagcttggaagaaactttgtcccgggcaggaactttcttctatttttttaatatactgtagtataccacgagggtattaaaataaataaaatgaaattctatggaggttccattatgagcgataactataacaattgtgactgtgagcagagagagtcctatgactgtgactgcaaatgctgctgcgactgtgaaaaagtaagacctatcacacctaacagaacaacattaaaatgcggctgtccaggcgctgtcacactcccgcttgccactatagcaggtacgaattttaccgtatctacagtcaccgtagatacaaaagggttccgcaaaccatgtattaaatttgaatttgccagcaatattgtaacaactgccgctgttttaactcttaacctgcagattttcaagcagtgtaaaaatcagcttgttcctatcccagtaggaccagtttggacattctcacgtttagtagcagtaacagccagtgacgcattctccttctttgtatgcgactgtgatatctgcgatacagaatgctgcacttacagtgtcgtagcaaccgttgccggtatcgcaaccgttggtgttacttctatcaataacgcaactctttccgctatcattgttgacaactgtgattgaccaataatgtagtaccgaaaaggagcagctatgtattatagtttatttggaagatgtcattatccaggtaccagaacatgtaactgctttcctcagaaatttaagcaacaaaataataacattggacaatgtaatcccccgtccagagcaactgcccaaagcaagtaacagacaaattctgcaaagacagcttatatataaaaagctcagctttcggggatttatattgcctgaaggtacagaaaagggagccacattacatgtggcttctcttaatctgaatactttaaatcatgaggattttgttgtccagttaaatttttcctgtaatattatcacaagtaaaataaagctgcggctaaggtttcagctttttaagcaggaaaagggacagtgccttcccactcctgtcagtaccggcgtattatattacagggacaaggaaagtcccgaggcaaatagttttaccttatcggcatatgattgtgattcggaagccagtacatgctgcaactatagcgcctgtgtaggagttgaagaatttgcaacaggaggaagcgtcataattgcaaaccctattttatccgcaactatagcaaatacaaattgatataaattatggaaggatctaactatgtcagttaaaaaatatcaagataacaactataaaatatccaacattagtataaaagataaccttttaagctgggaaatgcattccgtaccggtatcagggatcagccagatatgggcaggaacaaagcccgcagccccctttccgttcaaattatttcttattctattatttatagccttatccgcccaaacggttgccggccatattgccatgttgattctattggctttcagtgctgctctgtggctgtattatcataggcctgataaaaatatgaatcaggtgaatatcaagctcctttccggtgatgttattacgtttacaagcagcaatgaagaatccctggattcattctataaagcgttacaggaattcttgagcagacgtggttcaagtattgaatttgatgcagacgggaaaaaaattgaaacggttgaaattgaaccggttaaagaatcatccggaataatggggatggataaaaaaagcacctcaaataatcctttagtcaatgatttacgaaaactatatctgggatactcaaaaaagtcagatacgaacagtgaaattttacatctcatcgacaatgctgcccgattaattgaaacggatgacaaggaaggactgaaatccacgctaagggaatttatatcccagggctgatcggcgagtgtaatgaattggggcttgattcattgatacaggaaatcaagaataacatttattaaaggtataagtttaaaatgaaaaatacaggcaaaagtcaaagctaaggccggttggcagcattctgtacagatgctaagccacccggcccctttatttaatatgctgagccatacgcagagcatgcaggtttatagaacgtgcaactctttagctccatgtttaaatgctgtcaaaatagaaataatttgtatttagcaacgatattgtgacatatggatttccaagctttttcttgacatcgagaactatcttacgaaatgcatggtagtatacttctctgtccctgcaaaggacgggatttcgtgttgctatgattcttatcccgatactgtccatgccgcaccgatctatggtatcacatattaactccatggattcgattactccatttataaacactccgcatcctgcttcttcaactaatgcagctgcaatccataattttttcacatccgttattccaaactgcttatcacccacgctgtaaaaattcacaatatatctttcggtttccattctgaacttcctttttctaaaaatatatttccccacaatctaatttattcggtaaaaaggcccgtacagttcccgggccagccaaatttatgggtttttctaaataaatatgtagtgccagtgtaagaatattacactgacacatggacaaatcaggttgctgagcaattaggttacaattcgggtcaccgtaaatccatctgttttttgaagaattgcaaactggctgtaagatgtaccggatgatgagtaggaatctgcttcctcagttttaccaggagtatatacgttggcagttatcttagtaagcagacaaacgccccggcttccggccgtccagcttccccagggggctatttcaaaatcatcgctggaacaggctgcatacttcactgtaccttttacagtataattggtggagttcactatatgaacctttggatatgccataaatttacttcctttccttttttagaagcttgtcaggcttctaaaatattatatgtttatggctgacatttgtgaatccaaacgataacctgcacgccctgtgcacaggtcaccgccttcaatacaaaaaacgcaggataccttgctgttacaagattcctgcgttaaataaaaagagcgcgagacgggattcgaacccgcgaccctcgccttggcaaggcgatactccaccactgagccactcgcgcatatattagaatcggggtgacaggattcgaacctgcgacctcctggtcccaaaccaggcgctctagccaagctgagccacaccccgtcatccgtttctctatattatcatattcaatttataaatataacatataccttcaaaaccacatattgaaattcatccgtttaaatcataaggaatcgcttcctctatcctatccgtcaaaatactaaattcggtaaaacctcattaagtgttttgacacgcctcatactaagctcgacaatacctcgctaagtactctggcagcctaaaccttttggttaagccctcgaccgattagtaacagtcagctgcacatgttgccatgcttccacctctgccctatctacctcgtcgtcttcaaggggtcttactcttgcgatgggatatctcatcttgaggggggcttcacgcttagatgccttcagcgtttatcccgtcccgacttggctactctgccatgggtttgatacccaacagatacaccagaggtcagtccatcccggtcctctcgtactaaggacagctcctctcaaatatcctacgcccgcgccggatagggaccgaactgtctcacgacgttctgaacccagctcgcgtaccgctttaatgggcgaacagcccaacccttgggacctacttcagccccaggatgcgatgagccgacatcgaggtgccaaaccactccgtcgatgtgaactcttgggagtgataagcctgttatccccagggtagcttttatccgttgagcgatggcaatcccactttcataccaccggatcactaagtcctactttcgtacctgctcgacccgtcggtctcgcagtcaagctcccttatgcctttgcactctttgaatggtttccaaccattctgagggaacctttgagcgcctccgataccttttcggaggcgaccgccccagtcaaactccccacctgacattgtcccaccaccggatcacggtggctggttagaaatccagtatcacaagggtggtatcccaacagtggctccaagaagactggcgtcctctcttcacggcctcccacctatcctgtacatgcaataccgaatcccagtatcaagctggagtaaagctccatggggtctttccgtcctggcgcaggtaaccagcatcttcactggtatttcaatttcaccgggtgcattgttgagacagcgctcaaatcattacgcctttcgtgcgggtcggaacttacccgacaaggaatttcgctaccttaggaccgttatagttacggccgccgtttactggggcttagattcaaagcttcgcttgcgctaacctctcctcgtaaccttccagcaccgggcaggcgtcagcccatatacctcaccttacggttttgcatagacctgtgtttttgctaaacagttgcttgagcctattctctgcggcccactctcgtgggcaccctttatcccgaagttacagggtcattttgccgagttccttaacaatgcttctcccgccggccttaggattctctcctcatccacctgtgtcggtttacggtacgggtacatatcacgcaatagcggcttttcttgacagcccctacgccaacttcgctactaatgttcgctacgcgtcacgtcctcctgttgttaagcggatttgccagcctaaccagtcctacgcttgccccggtcttttcattcccgggtttgacttcggttctgtgtccccacagttctgatgatatgcagtacaggaatttcaacctgttgtccatcgactacgcttttcagcctcgccttaggccccgacttacccagagcagatcagctttactctggaaaccttagatattcggcctggaggattcccacctccatctcgctactcattccggcattctctcttctatacagtccacagctccttgccggtactgcttcgctccgtatagaatgctcctctaccaatcatattaatatgattcctaagcttcggtgttgtgttttagccccggacattttcggcgcaggacctctcgactagtgagctattacgcactctttgaatgtgtggctgcttctgagccaacatcctagttgtctttgaaatcccacatccttttccacttaacacacactttgggaccttagctgtaggtctgggctctttcccttttgactacccaacttatctcgtgcagtctgactcccgtacatcatctgtctggcattcggagtttgatattcttcggtagactttgacgccccctaggaaattcagtgctctacctccagcagactaatacgaggctagccctaaagctatttcgaggagaaccagctatctccgggttcgattggaatttctcccctatccacacctcatcgccacccttttcaacggatgtgcgttcggtcctccattcccttttacgggaacttcaacctggacatggataggtcacccggtttcgggtctgcacatgctgacttgacgccctattaagacttgatttctcttcggctccacaccttaagtgcttaaccttgccagcatccgcaactcgccggaccgttctacaaaaagtacgcggtcgcaccttaacgtgcttccacagcttgtaaacacagggtttcaggttctttttcactcccctcccggggtccttttcacctttccttcacagtactatgcgctatcggtcactaaggagtatttagccttggggggtggtcccccgacttcccgcaaggtttctcgtgtctcgcggtactctggatcctgctgctgcctattgttttcatgtacggggctttcaccctctctggctggtctttccaggaccattccattaacaaatcggctcacgtatgcagtccttaaccccagagtgcacgcactctggtttgggctctttccctttcgctcgccgctactcaggaaatcgatgtttctttcttctcctccgcctacttagatgtttcagttcagcgggttcccttccatacgttatggattggcgtatggatacttgaggtcttctcaagtgggtttccccattcagatatctccggatcaaaggatatttgctcctccccgaagcttttcgcagcttatcacgtctttcatcggctcttagtgccaaggcatccaccctgcgctcttattagcttaaccaattgacttccacctgcgggtgcgggttttagtctaagattcatagcgttgaatctttggtttaggtttacaataaaatttttggtttgttttggttacactttcgtgtaacacctcggatgtcttgattttgtctctcttttctcccttgtggcaagccactcggaagaatttcgaaactctatctagatattatttcaatatgcagttttcaaggtacatgctgtgcgcgtctcactactgcgaagcgtccgttccaaagccttcggctttcgctcgcgcaaatggagatggagagattcgaactcttgaccccctgcttgcaaggcaggtgctctcccaactgagctacacccccatagaaaaaatccggcatccacctgctttcccatatcgtctccaatatagtatcatcggccgctcaggtcttaaccatcgtgttcgggatgggaacgggtgtgtcccctgagcgcatcgacaccggaaatgttgtttccaggttttcatcaattgcagctccaaaagctgcgcaattgactcaatatcctcgaaaactcaacagtatataaaacctctacttcttcttccttagaaaggaggtgatccagccgcaccttccgatacggctaccttgttacgacttcaccccagttatcggtcccgccttcggcagctccctccttgcggttgggtcactgacttcgggcgttactgactcccatggtgtgacgggcggtgtgtacaagacccgggaacgtattcaccgcgacattctgattcgcgattactagcgattccagcttcgtgcaggcgagttgcagcctgcagtccgaactgagacgttatttttgagatttgctccacctcgcggtcttgcttctctttgtttacgccattgtagcacgtgtgtagcccagatcataaggggcatgatgatttgacgtcatccccaccttcctccaggttatccctggcagtctcccaagagttcccggccgaaccgctggctacttagaataagggttgcgctcgttgcgggacttaacccaacatctcacgacacgagctgacgacaaccatgcaccacctgtcttctccgccccgaagggaaggggacgttactcccccgtcggatcgatgtcaagacctggtaaggttcttcgcgttgcttcgaattaaaccacatgctccaccgcttgtgcgggtccccgtcaattcctttgagtttcattcttgcgaacgtactccccaggtggaatacttactgcgtttgcgacggcaccgaagagctttgctccccaacacctagtattcatcgtttacggcgtggactaccagggtatctaatcctgtttgctccccacgctttcgagcctcaacgtcagttatcgtccagtaagtcgccttcgccactggtgttcctcctaatatctacgcatttcaccgctacactaggaattccacttacctctccgacactccagttaaacagtttccaaagcagtcccgcagttgagccgcgggctttcacttcagacttgctttaccgtctacgctccctttacacccagtaaatccggataacgcttgccccctacgtattaccgcggctgctggcacgtagttagccggggcttcttagtcaggtaccgtcattttcttccctgctgatagagctttacataccgaaatacttcttcactcacgcggcgtcgctgcatcaggctttcgcccattgtgcaatattccccactgctgcctcccgtaggagtttgggccgtgtctcagtcccaatgtggccggtcaccctctcaggtcggctactgatcgtcgccttggtaagccgttaccttaccaactagctaatcagacgcgggtccatcttgtaccaccggagtttttcacactgtatcatgcgatactgtgcgcttatgcggtattagcagtcatttctaactgttgtcccccagtacaaggcaggttacccacgcgttactcacccgtccgccactcagtcaattcaacttccatccgaaaacttccgttaaatcgcttcgttcgacttgcatgtgttaggcacgccgccagcgttcatcctgagccaggatcaaactctcatgtttaagttttgattccgttcaaaaattcgcttggctaatttttaaaccgtattactgttgtttggtttttttgttctgaatgttctctcgaacttctaggcttaaccaaaagcctttgttctttaagaattttcaaggttttacatactgttcagttttcaaggttctttgttgttgttcgctgtcgttttcgtcagcagcaacttttatatcttatcacagtcgcttttgtttgtcaacaactttttacatttttttcaaatctttgttttgatttgttaccccgtttttcaagggcgagtattataataccaaacccctaaagaaaagtcaaccatttttttgcattttttgtttttatttttccattttattttaagctgctgtttttacaggtttttgtgtttaaaacaaggccggataaacagctgttttgctctttcttctatataatgtgttttcttctgtgagtaaagagcagatattctgactgctcttttatctgtccgcaatacaggccggtttcgtcgataaactgtcgatacctgcagttttctgcaatatcatagcttcctgcggcagaaaaccctatcggcattttatcgacgtccatatcatatactgattaaaaattatataagggggtattttttttatgtgggaaattattagtaacccggtaacactttcagttattgttatgtgtgtactttgtctgtgcaagcttaatgttattctgtcactgcttgtatcggctatggttgcaggatttgcggctggaatggggccaggcgaaatcatggggggtattatcacaggactgaacggaaatggaacaaatgccatagcttatctgcttctggggacgtttgcagcagctctggcacaaaccggactggcgacaatgctggccaagtggattgcatcggtagttaaggagagaaagtggattcttctggcaaccctggtcgtatgcgccataatttccggaaccattatcccggtacatattgcctatatcccggtattatttccaccgctgcttgtaatgatgaacaagatgaaaatggatcgccgccaggccgcctgcgttacggaattcggtctggtagccccatacgtaacgattccgcttgggtacggtgtcattttccagggaatcgttgctgaaaacatgacagccaacggcatgccgattgagatgatagaagtatggcctcatacgatcattctgggcgccggaatgcttgtcggccttatcggctcctggtggttcttccgcaagccgcgcgattatcaggatatttcactggagggtatttcactggaggacgaggcaatccgccttaacaaggatcatatcgtatccttaatcgcaatcgcaggcgttctgttcggccagctctattgggattcaatgcctctgggcgctcttctcggtattcttatcatgatcatcggcggcgccgttaagcttcgtaacagtgacggaacaatagccgaaggaatccggttgatgggtatggtttcttttatcatgctgattgcaggcgggtacgcctatgtagtaaaccagaccggcgctgtagacactctgatcgacgccacgcttgccatactcggggccagcaaagtagtattcgtcattgttttgattataatcggtcttttaatcacaatgggtatcggaacttcctttggaaccatcccggttatcgctttgttctatgtaccgatgtgtatgaaaatgaacatgagcgtcggagccacagcctgccttatcgcctgtgccgctgctcttggtgacgcaggttctcctgcttccgacagtacgcttgggcccacatccggtctgaatgccgacgggcagcacgaccatatctgggatacatgtgtgcctacattcttcttttacaatctgccgctggcaattgcaggattcatcggggggatgattctctaaatatgccgaaaaccggcggcgattctcaggcacaaagatgcactgttaccgccgccggttatttaaactttttccatacttagtagttttcttttctcagttcaaaatagctctgggaatacttgcacaccgggcatacctccggagctttctttccaattaccagatggccgcagatacggcattcccacatactctcctctgccttctcaaatacctgctgcatctcgacattatgaagcagcttgcggtaacgctcttcgtgggtcttctctattgcgcctacttttctaaaaagctccgccatctcaggaaaaccttcctcatcggcatcttttgcaaaacgatcatacatatcggtccactcatagttctctccctctgccgccgcaagaagattctccgctgtcgtcccgatatgtccaagggcttcaaaccacagcttcgcatgctcctgctcattcctggctgtctttaaaaagatctccgccagctggtcatatccttctctctgggcaaccatggcaaaatatgtatatttgtttctggcctggctctcaccggcaaagccttccatcagattcttctctgtctttgtcccagcatatttattaccggtattctccggcttctcttcaatcttctcaaatactgacgccggctgacggcagaccggacatgtaaatccttctgtaagttctccctcatgaatgtatccgcaaattgtacagcgatatttaactgaactgctcatattctttcctcctaaatcttcacttctgtctctgtagcctgtatgcagcatctgctctgccagctcactcagcggtttcttataaaattctctgtaaagctctatgatttctttgttctcatggctggtacgcagctccattccactgtctctgcggtaaagcccttctattcgttttttcctcagctcgtcgcctttttgcagcgtacccttgggctgccctccgcctccgatacatccgcccgggcaggtcatcacttctatgaaatggtattccttgccgccctcttttattcgttcaatgaattttgaagcggctttagttccgtatatgacggcgatatttactttcagcccttctatcactacctcggcttccttcacatcctccattccgcgtaccggttcaaggtcgtaaagtacggccggagctttctgttttgtgatagtttcatatgcagtccgcagcgcagcttccatcacgccgccggtatttccaaagataaccccggctccggatgcctcccccatcagcctgtcataggatgaatccgccaggcccgcaaagtctatcgcctcttccctggcccatatcgccagctctctggtggtaattacatagtccatgtcccgcattcccggaatccccaggtattctgcggccgcactcatctcctccctgcgtatctcaaacttcttcgcagtacagggagtaacggccacgttgactattttttcaggattcagccccatcttctttgcaaaatacgtctttacggtcggcccctgcattccaatcggactctttgcagtggacagatgcggcagcatgtccggatgataaatctccgcatacttgacccaggaaggacagcagctcgtaaactgcggcagcggcctgttcttttttgtaatccgctctatcagctcactggcctcttccataatcgttaaatcagcggcaaaattcgtatcgagcacgtaggaagctcccagcttacggagcaaagctaccatttttccctggacgaagcttccgtcttccatgtcaaactcttctcccagcgcaatcctcacagacggggaggtgttgaatataacaatcttttccggatcccggactgcttccctgacatcgcggtattcatatttttctgtaatgctggataccggacagacattggcacactggccgcagttaatacaaacggctgttcctccggtttgttcaagtgtatacgtcccgtggactccgatatagtccgtacagacatctctgcactgcccgcatttgatacaaagcgcctcatctctgcaaatggatgggttgtctttttcaatggggactcgtacgttcattggtaaatggttcattgacgcctcctaatatgatatatgctccaaaatcaataatgattactaatattagtttaccatatttttcatatttgtcaattaaaaatttatctgtcaccgtttttatcacgtactgaatcccagcgctattcacagccagtcttttgccgcggatgtgacggtgttttccctccaagctcgttatacaatgtaaatcctagtatcatcacacctcccgccgcctgcatcagtcccatggcctctcccattacgaataccgacatagcgcaggcaaccagaggatcgatgtaactcaaaattgccgcttcctgccctttcaaatctccaagcgatgaaaaatagaggcagtagccgattcccgtatgtacgacccccagtaccagcagattcataatacctaccgttcccgcttccattacatggaaacctgatttgaacagaacatagggaaacatgacaatcagtcctaccagaaactgcagcagtgttctgtctatcccatcaatgccggtaagggatttgttaatcaaaataatgcaggcgtataaaaccgcggcccccagtccgtaaccaactcccgtgacattgctgctgccgccctccaggccgccggaggatatcacaagaacgaggccggccgttgaacacgcaaaacagattatctgtttcagcgagagccgctcccgaaaaagcagggggcaagccgccatcacaattacaggcgcaaaataatagcttaaggtcgccacagagacagaggtataatggtatgcctcaaaaagaaaaatccagttaaaacctatcatagctcctgaagccataagcaggatgaggctttttctgctggccggaagacgaaattttctgcctctgacaagctgccacgccaaaatcacaaccgctgcaatcaccgcgcggaaaaatgcaatctcctccgacgcgagcggaatttttgcgacaaaatagccgagcgtgccaaatgcggccatagcagtaatattcatcagctttgcactgcgggttcggttctccattgctgttctccattcatgtctgtttcatattgatttcgattgtttattcatgccagttcctgtatgtatctctatagctgagtatatcacaattcaaaagctatttcattgccataatgacggaaaaatgaacatgacaccccctgatcatgttttccctggtataatagcagcaggaagcacttcacaccatttcaggaaaaatggaaaaaaacaaggaggacgaatcatgaacatcagagaagagttgcaaaaagcggggcccggttcggacggactgtattttaatcctgtcgatgttgtgccggataggatcaatgccgtcctgatcaatgaaattgtgccggaagacccgggagatgatttttacggcgggcctgacgcagcttatttgacaacggctctcccgctgtttcaggaggcgggaatcagggcaggcaccatcctggatatactcagtcagggaatatacctcacgaatgcggtgaaaatgccgaaaccggaatccacggtagatagaagcctcatcgagcagagcctgccctttctcgaaaaagagctgtcgttattccccaatttaaaggtaattatgctgatgggagacgtggcaaaaaaggccttcaacatgataagcagaaagacggcccgcaaaaatgcggtgccgtccgtctctacctataaaatacgccataccgaaatttactggcagggtatccgtattatgccgtcctatattatgaccggacagaatatattgatcgaaaaatcaaagtttgccatggccggcgaagatattgccgccatgtatagaatcattcattaagataccgaatcgttcaccagagcgtgtctgaaaattgctttctgtcagatgtgcgtcacactttgcaggagatggcaggaatgaattttcaaacaggctctaggacatgctacatttctgtcccgtctgttatgtaccgcagccccttctggatcctgagatattttttatactgctcttcacaggccgccactgcatatggttccggctcaaaacagttctggattttcacggttccctccgaaatctgttccagggaatcgaaacatccgcagtggtaagccgccagaagggcgattccaaatgccggacctatcattccatccatctgctcaatacggatattcagcacattggccagagtctgcatccacactctgctccttgagccgccaccgaccaccttgacgctgccgaagcggcacaaaggaaggcgcatcttctcggccagttcccggaagctgaaacaaagcccctctatcaccgcatacagcatatccgatcggtctgtctccgtactcagcccgataaaggctccgcggatacacggatctgcgtacaaggtcttttcccccgacagatggggatagaaaatcactccgcctgccagcgacttttccacgtctatcaggctgtccaccttggaaaaatcatcttcctccatgatcccgcggacccaccagtcaaatgtacttccattcgactgtaccgccccctgtacaagataggaatagcttttattatcaaaggaaaataggatcatctttccttttgcattatccttaagctctgcaaccggcatcatgaatacgcctgatgtccccagcgatatgaccggatagcccctccccagacagcctgtggaaatagccgtggcagggttatccccggttccggtcagcacatcgatctcctggggcagcgaaaaccgctctgccatatcagggctgagcgtgccggccgccaggacgctgccccggatctccggatagcactctttttcaaggcctatcatggctctcatctccggcgaccaccgtttctccctgatttgatataagcaggaggtggaagcctcgcagtaatccgtcccgaaatggcctgtcagcctgtatacgagataatcgggaccaatcaggaattttttgatcctcctgaaatgttccggttcattttccttgagccagtagagatttgccgccgggcttcctgtggaaatcgtccgggaaaggtattctccctccggaaattgttttatttcctccttcagcctcggaattaaatccctggttctgatatcattccacatcatggcgggccgcaccggctttccctctgcatccagaaccaccagcgtatgcatctgccctgtgaccccgattcccctgatccggctccggtcgcactgcatcaggatgcgatccatggcattcaccatacagtcgtaccatatttccggatcaatctcgctgaaaccgcgctccggctggaccgcctgatattcctccgtaatctgtgccagcacatttttattcccgtctatcagtaccagcttcattgcagaggttcctaaatctatgcctaaaaatgtatgttctgtgtgttccatactgcaatccacccttcgccttaccgccggctgttcattagttttcgttaatcatggtaaccagttccctggcttttctgctgacattttcaaccgcctcaatgctcagatggattacgtcgtgttcgttatgatccgcttcatagctctcgccaaatgtgcgtatgtattcttttctcaaatcggagccgtaattaattttgatgagtccgtgtttcttagcctcccagattacttccttcggaatgccggagcctccgtgaagcacaagcggaactgtggagacttcgttaatctttgccagcagcggaatgtcaatcctgggatccaggcataagccgtggacattgccgaccgaaacagccagcgtgtcacagcccgtccgctctacgaaatcggccaccatatccggatccgtcctgcactctgcctcattcaccacgtcctcctctttcccctgaagtgcgccaagctcggcttccaccggaatcccatagaaatgacagtattcggcggcccggcggcactcttctatgttttcctcaaagggaagatgggaggcgtcaatcatgatggaggtaaatcctgcatccacgcatgccttgacatcttcaaaggatttaccgtgatccagatggagtccgatgggagtttctgaatttttcaccgcatccaaggccatcagggcgattatacgcggattggagagtttcaggttattggaggatatctgaatatatcccggcagctttgcgtccatcagtccctttgctatcgctatggtcatttccagatttgtcgtattaaacgccggtaatacatgatgatgtttttttgcgaattccattaagtcaaaaccatttacaagtttcatagttatctcctccgtgatctactgttttatttaaaatcatgcatcttctcatagagcattttatatttcccgaatttatccatatagtactcatgcatccgggcgtccggcatatattctttttttatctttaccgcgcgtttgatgccttcctccaaagaagaataggccccagttccggccgcagccatcatcatgcagccaagggtacccgactcctcgttgaccagggacaatactttcatattgaagatgtcggcccgtatctgaagcgtcagcccggaggccgcccctcctcccgtcgccacgagcgactccatcttcgttcccagctttttgagacgttcgtaggaaagatacatctgaaatgccattccttccaggatggccctgtaaatctcttccgcctttgtatgaatggtaaggccggtgatggttccccgggcatccatggacagatcggggtttcccgccgaaccgaactgcgggaggaccataacctccgttcggatatcccggaccgcctcatcgatacgggaataaaagctttcccccctctcttcgcactccatcctgaagcctttcaggatactgtcccgcgcccagttcttcaaggcgccgcaggtcgtaacctccaggctggataaataggtgccgggcaggatataaggaatacaggtaaaatcattgtccatcatatacggcgtcatcaggggctccggtagcatcgtgaacaggaactcacatgtccccattccgcattccccagcctcgatgcggtttaatccgcttcccagggccgcacagctctgatcgtgtccgccggccaccagcatcatatcgggactcagatgcagttcctttgccgtctccggcaatatggcgccaattacggtacacggcttcaccggctcagacatctgttctgccctgattcctgccagcttaagaagctcctttgaccattccattttcctgatatcaaaggccatgcttctggccgccgaagaatagcttacctttctctgcccggtgagcatgtatccgacgaaatcttcatagaacaaaattgcctccgcccgtttcaccgcatcggtattccggttcagccacatatatttcggaagaccgtaaagctcgtttggcggcaggccggtaatctcaaaaatcttctgttcccccatcgtttctataatttcttttatctcttcaatccctctgggatcgcccgtcagcattgaattggccagcaccctgccctctttgtccaggcatacgaccgactctccaaggcttgtgacagccatggcctctatcttttccggacagttttcgcctgcttcccggagtacctctttcacatttttcataacggtttccgggtttagctcccggcggccgccgctgcccagctcctcatacttcctggaagccgtgaacaatatcgcgccgtccagatcgtagaccagcagcttcgctccgctggtgcccacatccagtcctgcaaatgccataaaatcacctctcagcactgttttttgattttcttgtcaactgccgcttactgctgcctggaacggctcttcttgaatacgtcgattacgactgccaccatgatgatgattcccttgaatacgccctgccagaaggagttgatacccatcaggttcagtccgttcgtgattacgccgataatcaggataccgataaatgtgcctcccacggttccaacgccgcccgacatgctggttccgccgattacgactgccgcgatggcatccatctcaaatccgtttcccagcgtggctgccgccgagccaagacgcgcggaccatacaataccgccgactccgcagagaagaccgattaggatataagggagcatattgtattttttcacatttacgcccgagtacctggctgccgtcttgttaccgcccagtgcatagatatagtacccaaaacgcgtcttgtttagtaaaacccaagtggcgattaagatcaccgcggcatagacaataataatggacactccgccgatgcttaagttgccgagtcccgtataagcggcattccggacacggattgtcacgccgcccgatatgatttccgtaaggccgcggccgatacactgggtggccagggtggccacaaaagccggcacctgcagatatgcgacggcaaaaccgttgacggttcccaccagagcgcccaccgcgagacagcttatcacggtcagccaaaccggtgcgtttaaattcgtaatcatatatgcaccgatgacgcccgtaagtccaacagtggagccgacggaaatatcaatctcccccatcaggatcgcaagcagcatgccgcagcagataattgcgttaaccgagttggactttaacaggtttaaaagatttgacgatgtcatgaacttcggtgttgagattgaaacaatgattataagcagaatcagaccgatgattgttccgatattgcgtttaaaataagcggagcctgtaaacggaacgctccgttctctcttcttttccataatgtacctcctgataattttccttattctctgctggttgcaaacgtcatcatggattcctgggagaattcttcctcggccagctcacctgtgattcttccttcacacatgacataacaccggttgcacatattgataatctccggaagctccgaggagaccatgataatcgatacgccttctgcggccagttcatcgatgatggcgtatatttccgcctttgagccgacatcgattcccctggtcggttcgtccagtataatcaccttcggttttttcgccagccatttgctcagcactaccttctgctggtttcctccgctcaggttccccgtgagctgcctggaggatgtgattttaatggagaatttctttctgtagtcctccaccatcttatcccatgccccgtgttttaccccgactcccctgatgaaatcaccgagacagacaagccccatattgaatttcacatcatttttgagaatcaggccctcgtcccttcgatcctcagagacatagacgataccattatcgatggcatcctgcggtctcttaatttccagctttttgccgtccagataaatatctccgcccgccttctggtatgcaccgaagattgtcttcatcagctctgttctcctggcccccaccagacctgcaaagcctacgatctctccgtaccgtgcatggaaattgatatccctgaaatacttatcatgttccaggcccttaacctccagggaggtacctttgatttcatgcttgtttcttgtataatagctgctcagttcgcggccgaccatcatcttaatcagttcgtccttatccgcctccggcgtgggaatatccccgatcattttgccgtcacgcagaacgacaatccgatccgtgattgcaaacagctcttccaatctgtgtgatatgtaaataataccgacgcctttttccttcagcagccggatgatgtcaaacagagtctccacttccccctgggacagtgaagatgtaggttcgtccattacgacgattctcgcctccgccgatacggctttaataatctccacaagctgctgcatgccgatggacagctcctccacgagctgatccgctctcaggttaaggtgcagatcgtcaattaccttctgcgtctcctcctccatcctctttgcatcgacaagaccaaatttatctctgagttcccgacccataaaaacatttgcggcgattgtcctggccggcaccagaatgatttcctgatggataattctgattccgttggctcccgctacagccgcagaatgtatatttttcacttctccgttaatccgtatttctccggaatctgctttgtagattccgcccagtatcttaattaatgttgattttccggcaccgttctcaccgaggatggctaccacttcaccttctccgacagaaaggtttacaccggtcagtactatgtttgaagcaaatgcttttgtgatattttgcatctgtaagagttttgttccgtccatacgctacctcgtattccctaaaagtttacgcctgttagatataggaaacctcataaatcttttccttatgacgtttcctgtgccgatttttgctgcgtgtaaacccggaatcttccttgcaaaaatcttgccccctccggtgggttcttgtaaacggcaatttttgccgtttattagaaaaaggtccggctcaaactctcgttttgagccgaaccacgtaatcaagagtaaccgttcagccatgatgtattccgcgaggtgttttcgctgttttttgcgaaaatcccgagttcccaggattttcgtgcagaacctgcactaaacgtaacagttcatgccgtctgaactgttacacgaaaacacctcgcgggatattacctgtgaaccgtaacgttcccagcgcctgtttagtcaagagaatcccatgcatcaaggtcatactcatcgatgttgtccgccgtaatgctgtaagactcaatgcttgtattgaatgtgatttcttttccgtttaaaaggtcaaccgcctctttgactcccatatatcccatgtatgtaggcctctgggcagagctttgaaccattgtgccgtctttgattgcatgctttccgattggagcgccgtcttttccgagaatatcgatggagcctgtcttgcctgcttcttccacagcctgtactgcgcctaaggccgacgtatcgttgattgcatagataacgtcgatgttgtcgtgagcctgaagcgcatcagataccacttcaaatgccgcgtctgtggcgcctttgccttccactacctgaacctccacaaatgcgtccgggttcttcacgttctctttaattccctgccagaatccgtctacgttgatgatacaggattcagccgtctgaagatggacaatcaggatattcgctccgtccggatgatgctctgccacccactggccggaaaggtatcctaactgtgtattatcggatgcgataattccgtcaaccagatcgtaatcttcttcctggattacattgtctacgttaatgactttcacgcctgcatccttgcatgtctgaagcacggtctgtgctcctgcggagtcatatgggatataaacgagagcgttgattccgcttgcgatcatatcatcaatctgggatgcctgttttgtcgggtcattctggggatcaaagtaaatcagttcgcagcccagttcgtcacacgctgtctgaacaccgtttaaaacagccgtaaagtattcgtttgtcaaagtatagggcgaaaatccgattgtgtaccctccttcttttgcctcgctcgaaaccgcctcggtcactgcttctgccgctgcctcggacgtctctgccggagccgccgttgtctctgccggcttggacgagcaagctgtcatggaaagcgccattgcacctgctaaaactacagataataatttcctcataaaaatttcctccttttcgttttttaatcatctgagctgtatttgattgtacgaacatattagcacatcagtttttgtacttcaatgctaattttacctaaatttttcctgtagtttttgttgtatttgtacatttaacgttcgtttattccttttattttgttcgaatatgttcatatattgaataatttctttcactaatttaaatccagtgggaattgaagagatttcagagctgtttaaatgtttatatttgttcgtttcaaatttgtccgatgatcggtttttatttgacaggaaacgttacaggtcaccgtcatcaataaaaagaccctccggaatctaatccggtgggtcgtctgtcttatcgtgcaggccttcggccgcccttatgcaattatcacttccacattatattttttgagcaggttcattccctcctcatcgatcccggcatcggtaatcaccccgtccacctgggaaagcgcggcaaaaccgttcagatcataggtattgaatttggaggaatccgtcaaaagataagtcctcttagcgactgaaaaaatggagcttttaaaccttgcctccggtgaatatccgtcatacagcctgccgtccgtccctatggcggccgctccgagaaatgccgtatcgagctggtatttccgaatctgctcttccgccacgcttccggaactgcaattggtgatccggatcatctcaccgcccagcataatcactgagagattatcgaattgcagggcatgctccgccaccttcagatgattggttacaattaccgcacgcgtttcctcatccatataattcaggataatccttgttgtggagcctgcgtctataaatatcctctgtccgttcttaatcagcgtggcagcttttgccgctatcttttcctttgcttccctgttggaaatgcgggattcgtcaaatgaaatcattctgaccacgggctggtttgccatcagcgcacctccgtgggtcctggttatgttatattgccgggccagcaggttcaaatccctgcggaccgtcatctcagaaatcccgaaccgctttgccagttcgtttacttccaccttatgctgcttttgcagaatatcgagtatggccagacatctttcacttttgttcacggtgagtaccatccttcttacattttttataatatatgtaatctgatacaatcattatagcactaaaacgaacatattcaagcataagtctttaatattgaaggaagaggacgcgtccggaacggaccggggttaatgtggtgaggttgtgtgtctgagtcttcagtccccgattggaggttatcgtgaggggaatccggccggaatgaattcccccaagccatagttaatgcataaggcggcacttagtggtcgcgacaaggtctccccccacttaacgcgtgagacaatcagccgccgggacggcctcacctgcttatttaatcacctcgtaccagaaaacagccgcagccgaaaccaacacggcaactgccagctgccctgccgacagaggggccagcttcagaaacgtatttactggtgaatagaaaatcacggccggcatcagcaccatagcggcaaaggccgcctgcattccgcggtctttcagaagccggaaaagggagcggagcgctgattccgaatccgagcagttgacaagcaccagaaacaggttggaaatcataatcaccatcagtcccatggagcgggatacgacggcgcgatcgggacaatttttcaggtggaagaagtacacggcaaaggaggcaatggcaatggcgattccctgcagcacgctcttagccagaatctgcggcgttaaaaggcggcctctcgattcttccggttttcttttcatgatatccggctccgccggctgccgttccaggacaatggaacaggtcggatcgataatcagctctaatagcacgatatgcacgggaagcagcatctgggcggagggcggggttccaaaaagcggcggcagcagagatgccagaataatcggcagatggattgtaaaaatatacccgaccgctctccttatgttgtcataaattctccggccgtcctttaccgtctccactatcgtcgtaaaattatcatccagcaggattaaatcggcggcttccctcgatacttcactgcccctcaggcccattgcgattccaatatcggcgtattttaaagccggtgcatcgttcacgccgtcccctgtcatagccacagtctccccatttttctgaagcgctttaatgatacgcattttatgttccggaacgactctcgaaaagacagatgtttctgccgcagcctttcccagctcctcgtccgtcatctgttccatttcatctcccgtgacaacttttccgccgtctattccgatccggcgggccacgctggaagccgtcactccgttatctccggttatcattatgacacggatgccggcattcctgcacactctgatatcctctgagatacctggtctcggaggatcggaaaggccgatcaggccgcagaggcgaagcttccatccctcgggttcctccggaatttcaaaaaagtccgcatcctcctctgccgatgccaccgcaatgactctcagaccttcagcggccatgtctttgccgatctgaagcgcttcatctatctcttcaccgcttctgcaaatggccgccaccttctccggtgagcctttgaccgcggctgtcagccttccatcccgcagccatacatggcccatcatttttttgccgtttgtaaatgcgtattccttcaccaggctgccgccgaagatttcctcttcactgattccctgttccccgcagtattgcagcatcgccttctccatcggatcataagcctccggctcacagcccattcccatgagcattaaaagcgtccgttcgtctttatccgccgcccatgtccggcccacactcattttattcatggtaagcgttcctgtcttgtcacagcagagaaccgacactgccccagcgtttccaccgacggcagacggcggaccaatgaatgtttttttgccagcctccaggcgcccatcgagagaaatacggtcaggacaaccggaaattcttccggtatcagcgccattgccagcgtaactccggccaggatgctccttgtcattctctcggcttctcccaggccggaaaggctgaaataagtaaaaataccggccagcagaaacagaactgccgctatggcggcgcagaccttcacaagccccgctgtctgccgctgaaggggcgtatcctcctccggggcctccgccacgtttaagcctatttttccgtattccgtcgtgatcccggtgcgctccgtcagaagcgccgcatttccctgtatcacaagtgtcccggcatagcaggtatcaccggctgtcccctccggcccatcctttttcgccgtcttccatacccccgcggattccccggtcagcatagattcatccacgcagaaatcactgcacgttaaaattaccgcatcggccggaactctgtctccttcacacagaaagaacacatctcccggcacaagctcctccccgggaatcacctgttccctgccgtcgcgcagcgccttcacccgcggcgccgtcatcttttgcagcgcggcaagggtgcggtccgttttccattcctgcatcacgtcaatccccaccaccccggtgataaagatgaacataaccgccccatccttcggttcccccaggataaaataaaccactgccgcgaaaaacagcagcaaaaacatcggttctcccaaaatatggagtgcttttcttaagaattttccttttttaccggatgtaagctcattttttccgtattgttccagcaattttgcagcctgggcagaggtaagccctgcctgcgctctgtctgtacctgccatacaaaaaacctcctgattataaataagtttttaccgtttctgtgcatcgattggtggcagagcggttttcatttaacaggagagttttcagttaaatgaaaaagcacatctgcggaacaattattaactgtcccgcagatgtgctgtcacacagtctgctgccgcctttcggcagcccggcgacgattctcatttcggccgtcgcctgctcactgtatcatatgcagcaaaattctgtttgctaatcgtatattatgtttttgtaatcattcagataaaactgctcaccggttactcatgtttaattgcttccagcgcaggaatttccactgcctttgatgcagggtaatatcctgcccctatcccgatcagaacggaaaacaggatggcaaatacggcaagccaccaggggattacagacagtcccgacgtctgctccatcatctctcccccaaatccccgaactcagaggacatcgcggcctggcctgccgccagattcattaacgccgatatcccaaagcttaaaacaacgcccgccagtccgccggcaaaaccgatacagcccgcctccataagaaagattttccggatatccctcacaaaacagcccagagatttcatcactccgatttcccgcgtccgctctgaaatggacataatcatagtattggtaattccaagagctgccacaaacagggaaacggctccgattccggcaaacatcatctgcttctgccttgcatctctctccatcggtttacggatgctttccatggaactggtccgaaatcccatttttttaatctgcctttccacctccgccacgttttttatatcctgcaccttgacaaccgcattgggataccctttgttcctttccaccttttttccgctgatacgcgcctgctgttccagcaaatcctttaagtccgaaagactcatcacaagtcccatcactgtttcttcgccttttccgtaatcctccttcaaaattcctgccgtctcgaatttctttgttatctttttatcatcatcccttccgctttccagctccgccgtaactgtaattttcatagggtcgaaataggcgggagggacaaccggcattccggacgcatcatagtcgccgccatacatatccaccatgtttttcccctccggccgtttcgtgtcctcaaaaccataggcaaaatactggcctgcaaaaatttttccaggtttccactgatcgaagctgccttccttcagcttatatcccattgtctcggcttccttaatatcaatcccggttacctgggcggaggcagaacggtatctgttgttttttcccgcaaaaagctggatgctgacattctccgcagtcagtttgggggtaacggcttccacccctttcatgtcttttatttttttgagggccttatcattaattcctgattttttcgtatttttcccggcagagtatacgttaataatcgtcagatcccccatctgggccagtgcgctctcctgcgctttcctcattcctattccaatggataccatgattacaacggaacagcagccgataattacccccaatacggtcagcatcgtcctggctttgtggcggctcaggttctgaaggcagaccatgatcagatcttttattttcatttttctgtcctctcctctgcgtcctgctcttcctctgccgtaccgttctcatcctcttctccgccttcatcctcgggaaaaacatcgtcccagtcatcgtcctgttcttcccgtttggcgtcttccattttcctgtcacggaattttttcctggcttttgctgcagcgaacagggctgtggcaagcagtacggccagggctgtggccggccaaaggaccgttccccgcggccttgccatttcgtcgttttcactgaaatcagcctgctcgttctgggcttccattacctccacgctgattggaatctcctccgttttctgctgcatggcctcatcctcatagctgacgcggatcttcccttctaccttcccggtttttttcggagtcactacaaaatcgatggtgccgctctttcccgcttcgaaattccccagagtcaaatctttttccagggcaggtatatctccctccagctttgcctccacattaaacacctgtcctctgcctttgttgacatatgggattgagattgtggcctcctcattctggcggaaattttccgagtaaaccggggatttcagttcaaaccggtccggctggtacacaggaatggctatcgtctcactggacgtcgcctgtttccgttcctttccgtctaaatactcgtatttaaatgaaattgttattttaggcgactggagctttgactggaaaagcgcctgtactttaatactctgtttttttgccgctcccgcatccagctttggtatgtatatggtgtttgaggaggaattgatggagattccttcccctgtatcaagagataccaccacattctccgccgcagtcacactgctcgtattggtcatctccatctccaggtcaaacacctggccggcagttaccttctctccgtatgaatagttgcggatgataatattaggagttgggatattcattttaccgctcttgccgtttgtcggaattacaagcttctctgcaatggtcccctggctgctgcccttgtcggaatcatagtcgaatttcagggacagtccgagcagctgtgacgctgcctgggaaagctccgctccggcctggagccggacagggatgtctactgcggttccggccttaagctcgcccagaagtcgcgtgtccgtctcatccagcagatatatctggtcattcggctctatggttgccgtcagattccggatatccttatcctggctggtattctccagcctgattaccatttgaaacgtttctcccgcattcaccggcctgtcaattctgccgcgtccaatccgtatcagcggctggcccgccgcccgcctcggaccggaatctgaaccttctgcgacagagagcctgatgtcaggctgcctcctgaatagtagttatatttcatttcaatatcgacggactgggatggaccggccagttcctgccccgccgtcatcctgaccgtaattttctttttctgtttcaggcccagacttgagactacctgggaacccgtatcatccgtgatatacagtccgtttcccggggaaatgttgacgataagatcttcaatatcggattctttgcttgtattttcaagttccagttccaggccaaaggactctccggaaccgacggctgtctgcgggctgatacgtttgattcggattacaggctggcctgtggcatcctcgctgttgtctccctttccctcatattcttcgcactcgctgatttcggccgttattgtctccgaagggatgcccgatttcttataattaactctgaggcgcagttcattgcctcttcctgagtaaacggcctttgggatggtaacggtaaattccaggttttcatcccgcttcgaggtgacctttactttggccgcccctgcatttctgaagctgtccgacagcttggaaactgtaatcccgttttttcccgcttcctccgtcgtaagcccttccgccctgacgctgaccaccagcttgacgttcttacccttccgtatcgcgtcgatgggggtattaccgcttaaagccgcataaacctcatagccgtccaccgtcagctttccgctcccttcgctctctccgctgccggaagggcttttctctttttctttctccggagccggtttttccgccggcggcgctgtctcaccaggtttttctcccggcggatttgcgtcctccggctttgcctccgacaggtttgtctccgccggtttaatctcctctgttttcccgtttcccgtctccgcgaggttttctgccgctgcggcggcaggcgccgcctccgttgcccacaccggactggccgagcatagtgtgatcatcatgcttaacatccatattacggccctttttataaccagctttctgttcattttatcgtttcctttcatctccaataatatttccgtctaccagtgtgacaatccggtccgcataccgggacattcccggatcatgagtgaccagtataatcgtctgctcatattttctggcaaaccctgttatcattttcattatttccgccgtagttctggaatccaggtttcctgtcggttcatcggcaaatatcaccttgggcctcgtcacaaacgccctggcaattcccgccctctgctgctgacctcccgacatctgtcccggataatggtccagcctgtgcgagaggccaactttacaaagaagctcttttgcaattttttctctcttatccttatccattccccggaacattaacggcatagccgtattttcaatggcggtcatggaaggaagcaggttgtatgactgaaatataaatccgatatactgctgccggaacgcggccagttcctcctccgacatcctggaaacatgctgtcccagtatcagcacttctccccgggttggtttttccatcccggcgagctggtttaaaagcgtactctttccggaaccggaggtgccgaaaatacagcatatttcacctttatagatagtcagattaatcctgtttaaggcaaccacctcttcgtcacccatccggtatacttttctgacatttttaacttggattgccgcctctcttttttccattgttctcctcctcgtttatagatggcatgatatcggatgaatccccaaaaattatggtatataattctgaagaaatcttaagatgaaccatggaacgataacctgcacaatccgtgcacaggtcgccgccattaacgcagaagaggcggccgtctgccgccgcagactaccgcctcttgatacactcccgttatataattcctgatacatggttcctggtgcatgatgccagttaccgtttcccgtaacctgaatccctattcctgtctattaatttcaaactcctgaattccgaaggctccgggcgctatctcgtatttatcaaatacgataaccgggtttccattcgctccgatataaaattttgtattctctcccactgtcttaaacccatccataccattgcttccatcccagtaaacgagattgcggtcggcagccatccgctcttccatctgccgcctgatgctgctgtttgctttctctttataatcctgccccagcaaatcccccagggtcagcttcttaccatttttcagatccagattgtagaaatactgtatcccataggccgaagcccagttctcatttgccgtaatttccagagacagcacatcctccgtctcatatttcacttcgtatcctgcatccactttgattcctttttcggcaaatgcttcttccgttcctcctgttgccagaaacgcctctttatattcttcaatcctctgctgtgcgtcacgtctgtatgcctccatgattgtttcaatttccttatttacgtccgcagccagcggggaggacgtgctgccggcctccgactcctgtatctgcggaatttccatgtggatttccttctcttcatcagccgtgtcataattgcggaatgtgagaaccctggagaccgcccctatgacgggcagccggccggctgtggcagcaaatgcttcatttgtgttcagggcggttataaaacaaactgccaatgcggccgcagccagccctattttaccgtggggactcttttttcccggcactgccgcttttccccttctctttccctgcgttcccgtctctgatacccgccgcctcatatctcgctgctcccaggtttcctgcttcagcgctccccgcaccacatcatccagcgccttaggcgtttccatcgattcatatattattttcgttcttccgatctcccgctccattttgctctgcttcatctgctctcctccttcagcttcttttccagacgtctcagccctgaataaaggcggtatttgacagctcccaggccgcttccggtagccctggcaatctcttccagggaaaaatcctcataaaacctcagaataatcactgtcctcagtttatccggcagtccctgtatctgacggtacagctcaaagtctgtctgcccgggctgcatttcaccctcctgcatcctgtatacctgctccggttcaaaggcaatttccctgctgtttttcctcatgtacccatgacactcattcaacagtatcctgtaaaaccatgttttcatatattccggttttctgattgccttataattctccagcgcctttacaatcgcattctgaagcgtatctaaagccgcatccctgtccttcatctgggagaccgcaaaacggtataatttctcctgattttccgtgataaatgttataagttccgtacgtacgccgtcacacatcgtctcacctctcctgtctcttgttttcatatcctgttatatagatgctgtaaataccaataaagtctgaaatcttaaaaaattcccccggaaccaatcccaagcctgtacagcgaatttgattctgaataatctttaaggtattattcctttctccgttaagattggctccctataataaatggaaacatcatccagaggagggcaattatgattgatgaaattttaaaacacaatgaggactttgtaaacaacggctcttatctgcattactctgccggtaaatatccacgaaaaaaactggcagttctctcctgcatggacacccgtctggtcgaactgcttccggctgcccttggcattaaagacggggatgttaagatgataaagaacgccggagcagtgattaccgaccccttcgacaccactgtgcggagcctgatcatcgccgtcctggaactgggcgtggaggaaatcatggtcatcacccatacaaattgcggcgttgcctccattacccccggtaccatccgttcccatcttgcggcccgcggcattgcaaaggaaaccataaaccggatggaagcggagggactggactttaacctctggttccagggctttgaaacgccgcaggaggaagctgaacgcaccgtctccctcctccgaacgcatccgttactcccacgtgatgtaaaaattaacggttttgtcatcgatgtggtgacgggacgcctcgaacctgttaattaagcagggcgtcctcctaacttcactaattgaatacgacgttttcacaactttaaaggagggctgccatgcagcccccctttgaggtagttctcctttttgaggtgtaaggagtcggatatggaatagatattatctttaaagcgaaattactccgagaacaagaccggcggccatgcagacaaggctgacgccccaaatccagaaaaagcaggttttaatatggtctttaatctcaacgcctgcgaggcccacgcctaaaaaggtagccggtaccacagggcttataaaggttgcacagttgcggcataccaccatggctattgcgatatgtgcagggttcactccaaatttgcttccgacaccgatgagaaccgggagaaggccatagaagtaggaatccgtacagaacatcatggtcagcggaaccgacaggaccccgataatcagcggcaggaaccgtcccatagactgcgggataaaggaagccaggatattggccatatggttcataatctcgctctcctccaatacgccgaggaatacgcctgcagccagaatcgtggatgccatcataagagccggaccggaatgcgacttaataattttattctgaagtttagcgccgggataattcaccagcagcgctgcgacacagcccagcataaatgtgaaataggacggtaccggcaggaaaatcagacagactatgatgagcagggtgagacagatattaaaccagaacaggttcggcctgataaggccgcttcgttctgcactgcctgccgtctcctcagaaatcattgtatcttccgcttccagagtgctgttaatgcccgcccccctctttttttccaccgttccccagaagaaggcggtaaaaagtgcgattacgatacccacagcctgcatcggcagaagctgcatccagagtacgttagcctccactcccagtacggaggcggaacgcatggtagggcctccccaggggagcaggttcattacgcccatcgccgtcacgcagattaagagcagcgtggtaggacgcattttcagtttcttatatacgggtagcatagccgggattgttatcaggaaagtggatgcgcctccgccgtccagatgcccgatcatggcaataatacatgacatcatggcaacgcccaccacattgttgcctacttttttcatcagggcattgataatgcggtcaaacattccggcatccgtcataattccgaaaaacaagacggagaaaatgaacagcgcggcagtggaatgcacgcccgaaacaccgcttttaataaaatctcccatttcgctgacggtaaatgttcctgtcagcacaagaatcgccgctgtcacagtagagactccgataaaagcgatggccggaaccgtaacattgcgcagcagtaaaacaatgatcatgataatggttgcaaagcctaaagccgcaagcatagtctcattcatgttttattcctcctctttcttctttaagctatcaagttctgagactattttaaaagcccaaccttacactcttacggtttctctcttaatttcatgtaagagaaatcttaaaaaatgttaaggttgggccttaaatggcgccgttttgtaagtccgggcagcatgaactgttacgccgctttgtcaattcagtgtctgaattgtccttatcgccttgagaatggaggaggcagacaccggtttatcaatataatcatcaataatttttctctgtttcgcctcaagcacttcttttgtgacttgttccgtcatgataattctctgcagtccgggacactgcccctgaatcgacatacagaaatcaaccgcgcttctgccgccaatactctgctccgccgccattgcgtcgaattccctgccccttaaatggttcctggcttcctcatagctcatacatgcggttacggcaatacccagtctgccgaaatctttttccagcagttttaagactttgggattgtcatccacgatcaaaaggtttagcagcttctcccccgcctcgttacactccagctctccatccggctcgtccccgtccttctgctcattgacgggcaggtatatatggaatatgcttccttctccgggatggctttcggcaaaaatatagcctttatgggaggatataatctgctcaacaagggcaagccccagtccggtgcccttgccccctttttggttgtgaaaaatggatcgaaaatctgcttcagaatctcatcgggcataccgcagccgttgtcggagatatccagcctgatatactgcctccagtcccccgggaccgacgacaagccgtattgtttaagctccccagcctgcgcggtgcggccgcttaccttgattgtcccttcctgatgtccgattgcatggattgcgttaacgcagatattgagaatgacctgattcatctgcgtctcatttccgaggaaacattcctgtgacagttctaactcatccgtcagctttatgttgacgggacagacggactggaccatcttaagtgcccgccggaatatctttgcggcattcaggtttttataagccgtctccatgttctttcggctcagggaggaaatctgctggataatctcttttgccttggccgaggcctcatatatctctgaggcgctgtcgtaaagctccgaatcctccggcagctccatcatcatcagatccgcatatcccataatcggagtcagaaggttgttaaactcatgggcgattccccctgtcattgttcccataatctggagtctctgctgatgggcaatccgttcctcgctctggtgcatggactccaatatctggttgagttcaagcagataggcgatttcttccgtatcatgtttcttttgttttataagctttgccatatacaaagccatcagaaggatagccgccatgattcccacaaataccagcgcaagttttgtaaaaccttctactacgggaatatagatatcattataatcaatcacggcgctgatcaccaggaatccgtctccgatgatggccggagcgtaagcgctgattttcttcactctgggcgctcccggctttgtccaccagtaagaataatattcaagcaccccttcctcgccctttttctggctttccaccatctgatccaggcttgaaaggtctttgtccgggtacatctcctgccgcccgtcgatgacgtcgattccccattgcttcttctccggatgcatcaggattatgccgtcggaatcctttaccaccacataaccgtttgtccccaggcggatccccgatatcagggactggtaataattaatcgcatcaatcacaatggatatggagccgcctctttccagctcgcgcctgagtatcaggtagatctcgccgtcatccagcctgcactggcgaaagctcagcgcctcgtctatctctgtgacggaataggtttgcgtcactttaaagcctttcgtactttttaacacagctccctgaggatccgaaacgattacatcgtagacaaaccggctatgggagtccacatattcctgaataatttcccattccccatggcctcccttccggcggttaccggcctccattgtgcagaggctgtccaaatccgcctcatactcctcgatgaaaatttccaggttatctcccaggctctgggccgtcagaagcatctgttttttctggttgtcgataatcgttttcttatactcctcccagatgctgaaacccaggcaggaaaagagaaaaagcacgacagccagcactgcggccataaaagctatgatatttttgttgtcttcctttttttctctcatggtttcgtaaaatccttcctttggagatttagttaagcaggtgaggacgccgccggtacggccagcggacggggtggtgaggtgtgtatatgagtctttcgtcccggggggttggcatcgctggatggagaaggagatactgtggttttgttttcgcagggcggagccggagagaatgatatccggctggactgcttcttcgagggatagctctaagacagaggaaggcaaagcccccggggttacggacaaattcgctccgaactccgaatgagttcgaagctcaagttgtcccggattttgcccttgtagggctaaaatccgcccggcgcgctttgtctccctctgcctaagagctatcatctctcgggcgaacgtccttccggatatcattctctccttctccgccggaagatgtcggcagtatctccttctcccggaaggttttcgccgggacgaaagactccgccaagtgtatcggccccgtccactggcctgcggccgctgagtgtctcacgcgttaagtgcggagggaggaccttgtcgcggccactcagtgctaccgtttacgggaaatacgatatgctttcaatgcacctttattaaggaattgtggaagatttgatatcggccggccggaaacacgtagtggtctcgacagggtcctccccatttaaggttagagacaatcagcggccggagcggaccatgtccggtgtgcgaaaaccttcgcctgagtcttccgtccccggcaaaaatctgccccggggaagtaggcggaatcaattgcggagggggacatgggagtccgccggtgcttggcgaggtccctcacgagcttagcactgttgcgcactccaaagagtgcaaacggtccccgcagcaattcattccggccggattccccctccacaaccaacttcccacggggacggaagactcagccatccccctcaccacaccggacatggtccgttccggacgcgtcctcccaacctcagttaaatctccattttcacctgatattgacttgtactcttcttaatattataataattccagcaataagtacatcttatttttattatcgtattgaacatttcgggcacagtttaaagtaaaaacattggttgggggatactatggcggataaagttttgatcgtagacgacgatccatcgatttgcagactgctggaaaaggttatgcacagcaatgagctggaaaccacggttgcagacagcgggcttgccgctctgaaccttttaaagaaccattcttacgacatgatcctgatggacatcaccctgggcgatatggagggcttcgacgtaattaagaaactccgcagccaaggcatccagactcccgttatgattatcagcggcaggaacgaggattatgattccctgtacggtctgtcactgggggccgacgactatattaccaagcccttccggccccttgttctgggtgctaaggtaaaggctttgatccggcgcaacaagaatatggttctggaccactccgatgtcctggactgcggaccgttcacttataatacctccacgatgcgcttttacaaaggagaagaggaaatttccctctcttccaaagaaaacagcctgatgctgctgttcatgaagcatccggggcaggtatttaccaaagacatgatttatgagcatgtctggggcaccagcgtcgcagtcgatgacaatgccatcatggtctatatcaaccgcctgcggggcaagatcgaagaggacaggcagaaaccggagcatattgtcacagtcagaggactgggctaccgttttattccttaggacaggcagatggcaggaatgaattttcaaatacgccctattacagtattgcatcaatagctgtaccggattcccatttattcccttgataattaccataaatagtatgatataatcatttagtaacaatattgtaatatttatgtaatattaaggaggaaattaccatgagaaaatcattaatttatgcctttaccgcagcagccatgactgcagcaggagccgcagccccgatgacagcccaggctgccgtcaatacatatacgcttccgggaggaaacggacaggctatcgtaatcagcggaaacttaaattccttcaactgtgaaaacggtttccccggaatccagcttccggataacatgtttccgggcagccagataccgggcagcatgctgccggataatctgtttcctatcccggatttcggcggccagggaggcactgacggcggtatcatcgatggcggtatcatcgacggaggtatcaccggggacggacaaatcaaccaggacgatgcggcggctcaggtagtaaatctggtcaatgaagagcgggcaaaggcaggcctatcacctctgacagccgaccgttccgtcacaagcgcggcccagagaagagcgcgtgagatcgagactaatttctcccacacaagaccgaacggcagcagtttttccaccgcgctcagcgaagccggcgtgaattacagaagttccggagaaaatattgcctacggccagacttccgcatcaagtgtaatgcagggctggatgaacagctccggccaccgcgccaatatcttaaatggtaattttactaaaatcggagtaggccattataagagcgcctccggtgtagattactggacacagttatttacaaactaaatccttttcaccggccggtgaaaagcggttctgtataaacgataacctgcacgctccgcgcacaggtcaccgtcatcaataagggactaccgcccgccacggcgatagtcccttaacggtttcctgtccggctgcaaaaggctgactgtgcgtattctcacggttcagtctgagcattgagcatcacgcagacagtaaaatatgtcttgtcatattctactttcatgaccccctgatatttctccaccactttattaaccgactccaggccgattccggctccttcgtgtttagttgaggaaaatctccccttctgccggttaatctgatttccatatgtattctttatcgttaaaatcaactgccggcctttcctgcatgcgttcactttaatatattttctgccttcactctgagcaatacaggcctcggctgcattctccaccagattaccgaaaataatgcataaatccgtatcagctataccgcattcctccggcagatccaccgtgatttccgtctcgattccgtggttctgcgccataccggcataatgttgaagtatcacatcagccacatgatttttgcagagagaaaaatcccggcacgcctcatattccggtatcagctttttgagatagctttgaagctgctccatatctccgttctcggaaaacccgttcagggacatcaggtggtgcctccagtcatggcggagccgtctggtgctctcaatattttccagcagtttttcataccgctctttctgcatctctaactgcatcgtaatgcgttttgtatcctccatggcagagatgccctcatgcgtctggataatcatctgcagtgttacccagaacagcgcgtaggtcgtaaaagaccagagaatcgtgaacaggatatcccccgtccccatatgtaccggctttttccagtaatcgctgatgaattttacatagaaaaccagataagtgagggcaggaatcacccagataaaccgccagaatgaggatgccacattcagctcaatcacttttttataaaggtctaagaacaggctgccgagcagggggatataaccgataagcaccagcaccgcataaagcagctttgacagctcgcaggaaaagggaaggtgcagtacatgccccattacctttcccacgaccatgatattcacgtagagattcagtactacaagcacaagaaacaggatttccaggcggctgcacctgacgctcagatagaaaatcagcactgccagaaaaatccacagcaaaattccaaaggtactgtatttgtaataattacgtccggacgacaggaacagaatcgtcaccgccactgtgatcgcaatcagcagcaagacgagcaagcaagtaacagggacattgtgcttataacggcacctgagtggggcgtatacaatataggcaaagaccatacaggtgacggcaaccctgactgcaatacagataagatccgtgtccacggaatgcctccttcccggtatgtatcttttcgctgccacatacactgttttctttttcgaacgcacgacggttctgtttaccgcaataattcattatcatcatcaggagcccgtgcaggcgctgtccctctgtgccagcataaacgcctccatgtcatcctctgacataggtctggaataatagaatccctgaatctgatcaacttgacagtccaaaaccagccgtttctgctcctctgtctcgactccctcggcgatcacgcgcatgcccaggttcttaaaagcacttatcaggttcctgacggcataaaatgctgttttcttttccattgcagcatataccaggctcttatccagcttgactgttccgaagggaatgtgaaagaccgttgaaatattggaataaccggtgccaaaatcatccagtccaatcatgattccatattggttcatctcatatgcaaattccgtgaccagtctgggattttcagccagagtactctccgtaaattcaatctttatctttgtgaacggggttccgttccgttttataatatccagtaccttctgcgccaaatccggttctgaaaactgcaccgccgagaagttgacatggattgctcccacctcaattccttgttccgtcagcctgttaatatatttacaaaccttatccagaataatataggtgatttcaatgataaggccggtttcttcggcaacgggaataaactcggacggatagaccgggccgattggcgtgtgattgagacgcatcagggactccgcataatgaaaggctccatcctctgccgaatagatcggctgataatacatttcaaaggaggggtttttcaattcatctttcaatatctgtatcacgctgttccttcgctccagttcagcgagcatgacctcatcgcaatagcagataaaaccatgtctgcctgtcttcgcctggaaaacggcatattcgatggagttgattgccgtttccagcgtatcgccgcttcgtgtccggcgtatgactcccaccgcgaccgacagtgtaaaccggtactcttctacttcccagggctgcttcatccgctcccgtatcgcagcaaggcactccttgatatccccgtcactttccgaagtgaagagaagggcaaactcatccccgctgaagcggtacacaccgtccctgggaccgatttcacagagatatccgcagattttccttagaaattcatctcctttgtgctggccgcagacattgttaatctgccggaactgccgaagcgataccacggccagtgtaaactgtttttccggatgctttttaatcagcagccccatcatatccagaagctcctgacggtttggcacatttgtcagataatcccgcgagatctggcggttctgcaaatggagataaattatcagcatagcacaggtagccgccgaccctgtcagaataatttccggataaatctgctggataaaaataacaaataccgcaagaagcgggaacgctgccagaatgctgtataccgtccgctcaatctgtttccggtgtattaccgtcatgctcagactggccagacagtaaaaataaaagaccagataggtgagataaagacagcctcccctttcatatccgtccgcgctgagcgtaaacagcattcccgtcagcggattagccagtaccaccagcgagtaggccacacccggaatcatccaaaaaacgagcccccgtctcagtgaagagcttccctcaaagagaacagctgccgcatatgtaaaatagatcagtcccatcaggggcgtaaacagaaagtatactgtcgtcacaatccaggtcatccaccgcaggccggaacgcagataataaatcatgaacgtggacaatatattgctgccgattgcgatgaacgtaatcaccaggcacaactggaaggttctgttcttaaatgaagggagatggcttccctttctcgaatacgtccatataatgagcagaaaaatgagggaaaccacttccggtgcaatattccaggtcatcctgtcacctgccatttccggcgcaaatatccttcaaacagcattcctcacaatgaggctttgttctcgccgtacagacatctcttccgtgataaacaagcctgtggcaaaaatcactcccctcttcgggaggaataattttccataattccatctccacttttttaggatctttgatgttatccaccagccccatccggtttaccagacggatacaatgggtatcggtcacaatggccggttttccaaaaacgtctcccatgatgagatttgcgcttttacggccgactcccggcagcttcaacagggcgtcaaagtcctccggcactttccctccgtactgctcccacaaaatcttcatacaggcatttatgtctctggccttactgcgcccgaggccgcagggcctgacaatctcctcaattttatccacgtccgcttccgccagcgccttcacatcgggaaatttatcatataaatcctgaaccacaacattcactctggcatcggtacactgggccgccagccggacactaaccagaagcttccatgcctggttataatcgagcgtacagcccgcatcaggatattcctcttttaatcgttttattatttcaagagccagttcctttttcgtcatttctgtatctctcccccgttcccccaatcataaacatgctttatcctgtagctgcagcgaaacctcatttatttaagccttaacagcccacctcattttagtcgaacgggcgcggctgttcatattgcactcttctgctgtcggacggattacctcatctgcaatttcactgtaaaccccttgtttttttaaccgcttaaacgatttcttgacgaggcggtcctcaccggaatgaaacgtcaggatcgccgcccttcctcccggcgacagtatatccggcagtttttccagaaattcttccagcacctcaaactcactgttcacatcgattcggagggcctgaaatgtcctctggcatgattttttgaccgcttcctttctctcgccttccggcaggaaagagagtgcctcttctatcagcctgcgcagcttcgtcgtcgtatcaatggcggtacctttgcgtctcgccgatattactgcgcgggaaatctcagccgcataaggttcatccgagttctccgccagcatcccctccagttcttccctggaaatatctttaaggcgctctgccgctgagattcctttttcagaatccagacggagatccagcggcccctcattcttgtaagaaaagcctctgtccgggttatcaatctgcatcgatgaaacccccagatccgccagcacaaaatcaaaggttcccgcctccgccgccacctgatcaatattcgcaaagttcagtttcctgacggtgagaagctccggaccgtagcccagggcttccagtcgctttcttgtcttttcctgctctacggcatccacatcgaggccataaatatggccttttccctgcaggcattcaagcattgcctgagtgtgtccgccatagcccagcgtagcgtccagccccttctgccccggctgtatctgaagaaattccaatatttcctttacgcagatcgaaatgtgcatgccgacgggcgtgctgccctttttaatcaccctctcaaccgtctcgggatatttatctggctgcagctctttatatttctcattatatttacgcggatgagtccccttataacggacacggcgtttatgctgttcctgattctccatcggttacctcctgttaaaaatcctgttaagaataaaaacgtacgtaccttcttttttcgagatctcatattccttcagaacagagaaaccgttccgggccgccagcggccttacaaaccctctgtttctcgaataaaggattatgatgccgtcttccttaaggaaaccggcaatacagccgaagaaacgcaggtacagcccgtatatctcttcttccgtaacgtgtcccatctgaaacggcatgtccgtgataacctcgtcaaacagatagtcgtggcggaactggaagaaatcacggttgatataatgggccgccataccggcagcttccgtattctttctggcctttcgcaccgcatcctcctggatatccacaccgtaggaggtgtaggccctgactgctttatggcgttcaatcagcatggtcccggcgccgcagaagggatccagcacctgcgccccttctttcatgtattccctggcgagcgccgccgtcaatgcggccgccgtcggacggataccggtgggcgtgacttcctttctgtatgaaaagcggttgtctttcaaagtatagagtttcagcagcagattacaattgccctctttattctctatcaggcgcagctccacttcataatccgtggccgtattaatcagcttcctgccggacagcttttcaatctggccggacagtttccgtataaaagcgcttcgctcctccagtgtcttcctgctcttcagctcgattctgaaataccatggttcacccccgccgtggctttcgttaaggagggaaagaaggccggagccggtaatcacctctgccgccttaaacggttccatcgggcatgttcccatatccctgactacaaataaaagctcctgccaggtccgtattttatccatccatcttaaattcgtcaccctggctctgactcccgcgccaaacaccttcgatttggcatccggattaagggccgtcagttcctcctgcgtcaggcctgcaaaattgcggttggtcaggaggacaatatcataaggccggtcaaagccggtaaattcatggttcttaatgccttccgcccggaccacgagggcagataattccctcatttcttccatcaggtgctttctgttctcctgcgtctcctccatctttccaagcaaacagagctgctccttcagttcttccagataagcgctgtaattaaaactgccgatggcggacaggtaggcgcttttgacaaaacgctgctcctctctgcggtatgccgcgtaaaccggctccaaaaactcctgatttccaagatcccccatcaaaagcgcagcatttttccgtgtctttgcatcttccgaccaaagcagcccggctaattgttcctcctgtcctttcacaagtgaagacaggactttcagcttccctttgtcttttacttcctgcctcagaaggcttaaattctgcctcacatccctgttctgtgcaatctgattccaatactcctttatcatattcctcccctggtggttctcacttttctgatttttcctttgatcggcttgtcctgcaggctttccaggacatggcttcctttaccgtttaatatttctacataggtcaggctttccctgacatcaataattcctatatccgagacttctatcccatcgatactgcataaggttcccacaatgtcaccgggacgcatttttgatttcctgccgcctccgatggacaggcgggtgatatcctgattcagagccgcccttttggacggctttgcctctgttttaagccgctgtgacttccagaagtttttttcttcttccccgctgctctcagggcaaaccaatacaggcagagagcgtccggtatattcctccgtcatctgaagcatacgcctgtcctcagccgttaccagactgactgctttgccggtcctgccgtttcttccggtccgtccgatgcggtggacatacgtctctcttccggtgggaaaatcgtaattgatgacatgagtgatattctccagatcaattcctctggccgccacatccgtagctatcagataccggacagccccccgccggaacgcatcaatggtcttcaagcgttctttctgttccagctctccgtggatcattccgcagaatatcctgtgtctgcgcagtttttggaacagcacgtttaccatctccctcgttccgcagaaaataatacagcactgtggattttccctgtacagtacattcagaaaaaccttaaatttattttcattatccgtctcaaaaagctcctccgtgatggcattctccgccgcctccggctgttccgtaaaaatcatcaccatatcatggatatgggaaccggcgaactcacggatttccggtttcagagtcgctgaaaacagggcaatcctgcactcaggagagaggaggtcaagaatctgcttaacctcgtcgataaaacccatgtcaagcatcagatccgcctcatcgattacgagacaggtgactttgtcaagaatgaggctccccctgcgtatatgatccataacacggcccggtgtgcctgtgacaatatgagatttctgtttcaggctccgtatctgtttatcgatgggaaaaccgccgaacacggcaggaaccttcaggcgttttttccttccgatatgaaagacttcttcctgaacctgtaccgtcagctctcttgttggctccagaatcagcgcctgcggaaggttttcctcccatattatcttatcgcagatgggaatcgcaaacgccgccgtcttaccgctcccggtaggcgctctcccgaccacattctttccctccagcatagccggaattacctgctgctggatctcagtgggcctttcgtagccgagcagcctcagtgattccaatatatcgtccgacagcccataggcgccgaagctgtcctggttttcatttatcattattcaccgccaatcaacaaaaacaccctgccgggcggcactggctcacgatctgtatcgtaagaaagcgctgggcaaggattaattaccgtcattttatcattttatgcgaaagatagcaaggattacataagaaagtgctgattatatattacagttcagccttcggccaaactgcaacaaatgatacacagaaacggcaaaaaaacatcatggctgaactgttgcgattatacgctgaccggacggcccggaatgccgcggcccgcaaaatattctgcgggccgctttccatattttaaatttgtttttaaatttctgccgtttcttatggaagcaatgcaaaccgtttatcccggatgaatttcctcctggaaggattcccctcacagcggtatatctccaattctttcaggtcgtaaataaccgaccacaccgtatccttgcctgtggcccgctcataccggcacatgaaaccaaaccggcccgacagtatcttttttgcaaactccggatcccgcttgtcttccgcctcaaatgccctctgtatggtctgataccgctcctctgcgttccagttgtctatttgcgtgttattgaagtgtttcatggaatccagatgaaatgaattgacagcagatacaaaagggtgttcttcatcctggtatctgatttctgtttgctccgcattacattcgatgacggcagcattgccctgcctgtctgctgcggtgaaggtctggctcgaggcaatcggaagcgcctttaaagcttctgtaaattccggcacagtggcgcaccgttccaggccatatcttaaaatcatcccggcattcaggccggcgccgaggacggaaggccagacggccgttaatccgattgccagcccgcgttcattcactccgtcctccatctctacaaaagcagtggtatttccctggaaggaataaggggggccaaacgctgcgggtttcttgattttataaatgcaattcatataaaacttttctatttccgtcagaaaatcactgttcctggcaagaatgatgtgattttcatttttaaatgccacacaggagcatttctgctccggcatgatgcagtacatgcttagaagcacggccataagtttttccgatgcgattttctgtcctgcggctatcccctcaatttcctccagcacctcaggaaaatattgttcgtatgagggaatgcagcggcggctgaatttaatccgctcctcagtgatgggaaagggaaccccgtcaagcagttttttcccgtttttgagcaaaagcccgccccattttaagccaatctcataatgcgttccgttaaatctcccgtgatacatattttgctctccttcttatatccggcgggaaagagtcagcgaaacgcattttccccgccggtattgagagctaccggtaactctgagaaaagcataattgaataaaattttaatgtcaataccctatattatcaaaatattaatactcggcgccccttatctgcaccgctcaatccgtatccggtatttccccaggtgtgccaggacacctttttcctgcttatttttcccgtcttctttctcccaggccagattctgataacggtggatactgaatatcactccgagaagaacataaatagtcacagtatggtacccgccatatgaaaagaacggcagaccgcctgtggaaattgtataaaagccaaagttgatcattagatttccggcaatctcggctgctatcaccatgagacagccataacccactatcttgcccagcctgtttttctgtttatatatcatccggaacaggcagaacaagaatactgccaataagccaaccaaaagacaagccgctataattccatataccgaggccacctgaagcaggatataatcgtcttgaacaccaggcagcatatggatgggcagctgttccggtttcacgccaccggttccgaacatggtgagtccctctatcacttctcttgtcctggctgcctgataaccggctccctgggcataccgttccgggtggaataaaacttcaatccgttttatatggtacggctgcagttgtgcaagaaccgctatgactgcggaaaccggtatgataccggctgacagaacaatgcctgccttccggttctcgttaaaccatccttttatcacggcggccgtcatcatgatataacagacacaggccataacaattgtaatccctaatccgccgccaatccgggccgctgcaatccagaaagccgctgccagccaaaaaagactggatgctattccgtaatacccgcggttcctgttctgatacaagattcctccatacaccgggacaaacagatagataagacttttcaggtaggaatgactgccaagatagccaggcgctgacaggcagataataaacagtcccgccagcagtaaggctcccatttttttcccatgtctgcccaccgggctgtagtccacgcagaggatgacaagcataactgcggtccccatgagcacataaacgcattggcgggcaaaggcattatcaattaccctctggtaaactaccagctcctcaccaaaccggtagaagctgaaatactgggtcaatagtccggccacactcatcataaacgccaggagaaacagaggagcgcccggctttggcctgtggatacgatccatctcgattcccacctccaccggatctcccatctgcctaaccgcctgctctatggcttcttcggcggacattccctccttttcataaaactcggcctggtcttctatatggttcctgatttcttcgatgacctcggccttcgcctttcgattccgaatctgttcctccagttgttccagataactattcagctccacacagctcacctcctatgattcgggaaacagccctgttatagaactgccattcctttttcttttcctccagcgctattctgccctctttcgtaattccgtaatatttacgtaccttccccatcacctccgcctcataagaaaacagaagcttctgtgattccatggtgtgaagcaaaggatacagcgtgcccgccttaagttcaaacagattctcagaacgttttccaagagtctcaatcatctcatatccgtacatatcacgttctgataagagttgtaaaagcagcatagacgtattgccggctgccgtttttttatctgacgccataaattacctccatatatagattatctatatataatatatatcgattatctatatatgtcaactcaaatcacggatggcttcattccatttgacataagattataaaattgataaatttatatatggtacacacatgataattttatccggatgatagaagaaaggacgaatgatgattacaatcagatatatcaatattgccctggaagttttcggaggcctgctgtccctgattttcattctgtgcctttcactgaccggacaaaggaaagaaaagctggaacgtatgtatatccgtgtccttataaccaacaccgccgttcttttctgtgatgcagccgcatggctattcaaaggccgtatggaccttctcggtttctatgccgtcaggattgcaaatttctgcgtgttttccttcggctatatcctgctggcagtatttaccgattaccttgtatgttttattgcttccagaggttttggcatttcaaaattccctgcacgggtcatgtggggtctttcatttaccgccatcgttcttgttattatctcccagttcaaccacatgtattatctcatcgatgacaataacatttatcaccgccaaaatcttttctggctgtcacagactttcggaattttctgtatgctaattgacggcagcctcctgtttcgataccgccgccggctgagccgggcagagctaatggccgtgggagcctatattgcaatgcctattattgcaatgttcctccagatttatatttatggaatcgcggttttatatcttgccactacaatatcggccctctgtatctatatcagcatccaggtggaacaatcacataaatttgcatgcgaggcgctggagctggaacgcagccgtacgcttctgatgctgtctcagatacagccgcattttctatacaactcactttccgttataaagggactgtgtcagacagaaccgcttctggcggaacaggcaatcgaccacttttcggactttctccggggtaacttaaactcgctgtcgaacggggatgtcattcctttcgaacaggagttatcccacgccagacactttctggcaatagaacaaatgcgttttggaaatcggattaaggtctgctataatatacctgtgacgaattttttcattccttccctgacgcttcagcctattgtggaaaacgctgtctgtcatggtattttgaagcgaaaagaaggaggaacggtcaccattgccacctctgagacagacagtgcatttacaatcacggtcatggatgacgggattggctttgatatattgaatcctccgacggataaccgggttcatatcggaataagcaatgtgcggacgcggctggctgcacaaagtaacggaagtcttgaaattaaaagcctgccgcaccacggaaccactgttactatcacaattcccaaggagtctgtcttatgaattttatcgcagtagacgatgaaccgcttgtgctgaatgttattataaaagcgatacaggatgcggccaccggctgtacggtacagggattcacgaattctgccgaagcgcttgatgccgtaaaatctggtctggcgcctgatgcagcgtttctcgatattgaaatgttcggtttaaacggactggagcttgccaaattaatacgtgaatattctaataatacaaaaattatatttgtaacaggttatccccaatatgcactggaagcctactccattcatgtaagaggttatctgttaaagccggtaactgccgaacgggtgcgggaagaacttgacgaactgggacgcgctcctctcgcctccggaaaacgcatccgtgtgcagaccttcggcaattttgagatttttgcggatggaaaaccggttcattttggtctcgccaaatccaaggagctgctggcctatctcatagaccgccgggggcgtccgttaacacaggggaactctgtgcggttctgtgggagcagaagccctgcagcctctccgtcaaaagtcatctgaggaccttggtgtccgacctggcacgcagtctgtccggcgcagacgcaggcgatatcctcttaaaaaaacgcaacagcttttccgtggactgcagcaggatggactgtgatctttatgcattcctgcgccgtgagcctgacgcaatcaatacctataccggagaatatatgaaacagtacgcgtgggccgagatgactctggcctccctggagcagcttttataacctgcctctttgcgctttctttgctctctgtctgttatagttatcagacagaaagcaaggtgaggaggctccattatgaaatcaatccagacaaaatttattattctcatactgggatgtgttatgctttcatctgccgttatcggcggggcaggcgttctcagcgcaaagaaagtagtagatgaggaatcagcaagaagcatgacgcttatgtgcagtgaaaaagcctgtgaactcaacggtctcttctcacgcatcgaacagtcggtaaacacactggccacctatgcagccgaggagctgcccgacattgccagtttcaaatcggatccggaagtggtgtcggcttatacaaaacggattcaaaacgttgccgtcaacgcagccaacaacacggagggcgctcttgctgtatatatccgatataatccggaattctcagagccaacctccggaattttctggagcaaaacagcgctggagggacgtttccaggaactgacccctactgatttttcccggtacagccccgatgatgtggcgcatgtgggctggtattaccttcctgtaaaaagcggaaaggctatctggatgtctccttatgtcaataaaaatattaatgtggaaatgatttcttacgtgattcccctctatgccgacagtaccaccatcggcgtggtaggcatggatatcgactttggaattatcaaggacagcgtccgttcaacccacctttatgacagcggctacgccttcctcacagacgaaaatgccaggctcgtataccataacgagctggaaacaggtacttccatggacagtcttgaaaacagccttaagcctgtcagcgacgaactgaaacgcggaggaagcagtaaccagcttttttcctaccaatggcacggagaaccgaaacggatgacactatgcagcctgagaaacgggatgcgtctggctctcacagcccctgccggtgagattgacgcctctaaaaacagcctgattctgcaaattctggtttccacggcagccatcgcactcttagccattttgctgaccatactgatgacacggcgtctgattaaaccactgcgtgagctgaatgacgctgccaaaaaaatcgctgaaggcgatctgtccgtatcgctcagccatcagacaaaggatgaggtgggaatgctggccgacagtttccagcagaccgtcagccatcttcaaaaatatatcgactatatcaacggattggcctaccgtgacggattaaccggcgttaagaataaaacggcttaccaggaaaccatcgcaagacttgaggagaagacgcggaccggcaaaccggagtttgccatggtagtttttgatgtcaataacctcaagcaggttaatgacaccatgggacatgattttggcgatatcctgattattgaatcctgtaaattaatctgcaaagtgtttaagcgcagtcccgtataccgtatcggcggcgatgaatttgtcgcgatattggaaaatggggattacgaacattataatgagctgctggaacggttccaggaagctttgaatgactacaacaaatacgccgggccagacggaaaaatatccatcgccaggggaatcgccgtttatgaggaatatgtggatctgaccgcaggagacgtattcaaacgggccgatgatgctatgtaccaaaataagctgatgatgaaacggctgatggcagagaaagaggaaaccggcgatacataaatacatgaaaacagccaatgctatatcatcaggcagctaatatcacttgacttttttgttccggaaagatattataatacagtcgggaatgaagttctcccccagtattgtttatactgaaaccgcttatttgagctgatgacttctgcggatacacgcaggagctgtcagcttttttgcgcttatggcagaaaataacctgcggcacactttatatgttataaggaggaatttatgttattaagtattgcagtcatgttaatttcagggatgtttttagggtggatctgtaaaaaaatgcatctgcccgcactgttgggaatgatatttaccgggatgctccttgggccatatgcacttgattatatagacggctccattctgtcgatttctgctgagcttcgcaaaattgcattgattattatcctggccagagcaggtttatccctggatgtggctgatttgaaaaaagtgggccgccccgctgtcctgatgtgctttctgcctgcctgttttgaaatattcggtatgatcctgctggctccgggaatgcttggcataaccgtgctggatgccgccattttaggggcggtggtgggagctgtctctcctgccgtcattgttcccaaaatgctgactctgctggaggaggggtacggaaccggaaaaagtattcctcagctgattctggccggggcctctgtagacgatatttttgtcatcgtaatgttttccgcgttcaccggcctggctcagggaggcactatttcacctgtaagttttcttcggataccactgtctatattatccggtattcttatgggaatcgtgattggatatggacttgcccggtattttggaaaaatacatatgagggacaccgccaaggtgcttctccttctgagcattgctttcctgctcgtctcggcggaagaccgttttactgatatcatcccattttccgctttaatagcagtcatgtgcattggaatctccctcaaaagagaaaggacggccgtagcctgccgactggcggcaaaattcaacaagctgtgggtagccgccgaaattattctctttgtacttgtgggagctaccgtagatttaaaatatgccactgccgcggggcctgcagcaataatcctgatcgtctgcgttcttatattccggatggccggagtgctgtgctgtctgctaaaaaccaggcttaatatgaaggagagattgttctgtatgatcgcctatatgccgaaggcaaccgtgcaggctgcaatcggaggaatccccctggcaatgggccttccgtgcggaaacatcgttctgactgtcgccgtgctggccatcctcataaccgctccgctgggagctttcctgatcgaattcacctataaaaaactcctggcataacagcactaccttagaccggccggtttgtcatgctcttagggccgaccgccggtgccgatgtattatgaagcagcgccgaagcggagtttattcttccttcggcggcagggaatagcggtaggtccgggtcagaatccctatctcctccagggtatttaccgtccggtaaacggtagccatgccaagcttcggatccctttttctggcttcatagtaaacatccttgcagctgctccaattgccttccagaatcacgtccagaagcatctcacgctgccccgttattctctttcctctcttctgaaattcatgaattacctgctctttctgccacatatcagttctcctcacttccataccggaaaatcacgccagaattagtcattacaaactttcagttttacaaccatattgccgttatgtacggaaaccactctgagccgcttgccagttatatgcaactaaccttcctctaggttagcatcatctaacttaaatgtcaatattttttcaatactacccgttatgtaacagcacataccctgttaaagaaaaaagcggcacaacaaatatgccatgcagccttttctatctctgttatagttataccaaatcaggaacagcgcttttcaagaatttccgtaagggccgtgccgctgctggtgtgacagcggacaatgtccgttctttcactgtccacctctcccaacgcacatttgatcatcttatgggacacggtatttgtgaaaagtaccaggatgtccggacatcctatctgtttgtttaaatctgccgacatctgcgtaaaaacctttgccttgcatttataatttttacaaatcttcttgtactgtcctaccatgcggtcatgtccgcctacgattactacgctcataactcactctcctgtctttcagaataaaaatcttttatttgttagttagtttaaactaaccatattatacacggccattctatgacttgtctatagttttagcagagaattattatcaataaccgccgccatcaatggaaaggtgagacggaacaggtacggatgcgccattctcacctctccgggttaacgtttaaacactctccagtatcgcggctatctccgccaggctcttttttccgaaatacacctggctgtcgttgagaaccatgcagggaacactcataatcttatattttttcttaatctcaggataatgtctcaaatcgatcatctctcctgtcacgtattccgaaaaagaggcggctctctgggctgccatcaccacttcagggcacatggtacaggataacgataccattaccttgatattcgtctcctttttgatagaccggagacggttcttaagttcttcgtcaacaggctgacccggacctgccatattgtagagggcaatgacaaaggagttaaactcatggcctcccgggactccgtggaacaggatattgccgccgctgccgtcaccgcgcatcagcctgaatgccgggaaaatttcaccctctgcctctcttttggcttttaccgccgggtcaagccgatccctgatacaggttattttatcggtaagtccctcgaattctcccaggaaagcgctcatttctcccgacagaggactatcatcaagctccgcctttatcacagcctgtccggcaaatttgagaaacagtcccgcaagctgccgctttatctcctccgacagaaaaccgttattttccccatggcccaacgtttcacgcttctctgcgccttctattttgccgtctgccgcggcgcgggatgccgggcgatccgtttgagcctcatttccgggcagttcagggatatttagtttatcatgtatggccgatacgtgtttttccaatgacgtggctgccaccgcgccgtcggacaccgccgttacgacctgtctcaaattcttgatgcacacatcaccggcgccgtagacgccgtccacattcgtcttccggttcatgtcggtaatcaggtaaccctgcttatcacagtccaccttaccatccatccaggcggtattcggtacataaccggcgaaaacgaagattccgaacgctccgtcttcccctgcttcgcgggtccattcttcccccgtcctgttatctctgaaacgggcgaaggaaaccatggactctccgcctgcctccacaatctccgtattgaacctgaccgttatcttctcttctttttttacctgatccgctatggtcgcggcacaggtaaagtcatcctcccggacaatcatcgttaccttttttgcatacttggtcaggaaaattccttcctccgccgccgcaaagccgccgccaatgacgaacacttccatatctgtaaaaaattccccgtcacaggtcgcacagtatgccacgcctctgccctgaaattctttctcgcctttgaaacccagctttctcggattggcaccggtagcaagcactacgccaagggcccggtactctcccgccgtcgtgtgaagcaccttgatatcctcctgaagctccatgtcaagaacttcagccataacaaactccgctccgaatgcctcggcctgctctttcatcgattgagtcagttcctttccgctggttctctccacgcccggataattgacgatttcagcggtgatagtaatctgtccgccgattttttctttttccatcaccagaaccttgtacctggccctggccatatagatggcggcggacagacccgcaggtccgccgccgacaattattacatcataaaattgttccatatactctcctcagaaaatatcgctctgaatctgattccgttaaatcaggccgacaagatccagactcggtttcagtgtctccgctccgggctgccacttggcagggcaaacctgatcgccgtgttcggcaacaaactgcgatgcctgaacgcgtctgtaaagctcgtccgcatttcttcccacatttccggctatcacctcgtaggcgacaatccttccttccggatttacgataaagctgccccgctccgccattccgtcagcctcaatcattacctcaaagtctctggcaagacgtccggtcgggtctgccagcatcggatatttaatctttttgattgtgtcagacgcatcgtgccatgccttgtgtacaaaatggctgtcgcaggatacgctgtaaatctcgcagccggccgccttaaactcctcatatttatttgccaggtcttccagctccgtcgggcaaacaaaggtaaaatcggccggataaaagaaaaataccgcccattttcccacaacatccgccttgctcacttccctgaacttcccgtccgcaaaggcctgcacagtaaaatcactgatctcttttcctattaatgacattgtaattcctccttgatattattttctgtctcttattgtgtcctgatatcataattttattttagtttcctttttagttagttctatctaactcaatatcactttaacaaaaccatgacaatttgtcaataaataatattgataattattatcattttagtcctcatgactgcttctgccatcacatttcctggcggcagtactacaggctccacgacaggctcctgctctgaagctccgccatgtggtgataaattcctctgcgctccatcaaatcctccggcgtgccctgctctgccacacagccgtcctttagtacgataatccgatcggcgcctgccactgtgcgcattctgtgggcaatgatgagtaccgttttattcctgaccatattcgagactgcctcctgaaccagtgtctcattctcaacatccagcgatgcagttgcctcatccatcagaatgaccggcgcgtctttgagaagcgccctggcaatggaaagacgctgccgttctcctcccgacaaggcggagccgttctccccaaccatggtcctgtatccgtccggcaggcggaggatgaattcttcgcatctggcggccctggctgcctccatcacttcccggtccgtggcctcctttcttcccagccgtatgttttccataatcgtgttgttaaataaaaccacatcctgaaatacgatggaaaagcttttcagcagcgtttccggttcgacctccctcacgtcgaccccgccgacggtaatttttcccctgtcaatatcccagaaccgggcggccagtctggcgctggtggatttaccgccgcctgacgggcctacgagagccgtcacctccccctgttttgcggtgaacgacacgtcccttaaaacctgctccccgtctttatatgagaatcctacgtgatcaaatacgatatcatatccattatagacagcctctttactgccgccctggaccgtttcctcctctatcgccttcatccgttctaccacaaggagagtcgaatatactgcggacagattctgcaggcagacgctcagaggaatgtacagtctggtagctgccagcatgaacatcagaaaaaccataaaaccgatggaaccggatgccagaagggaagctccggccagcaccgtcgtcgccatgccgattttcaggaacatctgcgcccccgtcaccagaattccgttcagtaactcaagacggattgtgatgttctccacatccgccagtttttcatccagtccctcaaggtacgcttccctccggttattggccctgatatcctgtatattctcaatacactcctgaatcccgtctgaggcggcgatttttttccctttttgtcttctctcaatccgatctaccatgggcctcgtacctgccgccagaaaaaacgataccggagccacccacagtaccgacaggcccatccgccaatcggccgccagcagtcctgcgcctatcagcgccgttgacaggacggctccaataagttccgggataaagtgggaaaacgcagtttccacaaatgtacagtctgacatgatcgttgtcgtcaaatcagccagatcacgctttccaaaaaaggacagcggaagtttccgaaggcgttccgcaatccggattctcatatccgcgctctctgcataggaggatataaacgttgcgacgtactgaatatactcaagcccaaagatgacggccagaatcaggacactggttcccacatatcctcccagccccatttggggcgttccaagccccacaagggggccaaacagccgttgcgtgaaaagaaacagaagccccacgggtaacatcagcccgatattggtaagggcgcacgcaaatatggccctcgtcaggttcttcccgccctgtctgcccagggcaaattttttctgtaaatatctgctcatgttctcttacctaccttccattctaccgatgactgataattcttccacattccggcgtacagcccgtctgccctgagaagctccccgtgttttccctgctccgcgatacgccctccctccataacatagatgcagtcagcgcggcataccgtggaaaggcggtgggcaatcatgattacggttttgccttccaccagtttttcaaacgcctgctggatgagatactcattgtccggatcggcaaatgccgtggcctcatccagaaccacaatcggggcatcctttaaaatggctctggccagggctatcctctgcacttcccctcccgagaggtacacgcccttcgttccaatgaccgtatcaagcccccggggcatttttttgataatatctccgcactgcgcggcccgaatggcactcatgacctcctccaccgcagcatccggcctggctgcccggatgttgttcagcaggctgtccttgaacaaacggctgtcctggaacacaaaactcaccagcttcatcagctcctccgttccgatttccctcacatcaataccgccgatggtgatacttccttcgtccgcgtcaaaaaacctgggaatcaggcttgccagtgtcgtctttccgctgccggatgctcccaccaccgctgccgtcgcccctgcggcacaaacagtgatacctgtttcaaagccggctccggtttttccgcgccctctttgccggctgcttcccgctccccctgttccgggtaataggaaaaggttacatttttaaattcaacgctgtattccgacggtttcttcggcacatccggctctttcaggggcttttccccgacaatgttcataatccggttcaccgcatcattcgccttcatcgtattttcaccggtcagcataatcttatccatcatggacacgcacacaggcgtgaacaggatataaaacatgagatccagagcagccgtcacgtacgattctcccttggatatgtctcccgctaaaagaatgccggcaggaatcaggacggcaaaaatgccgttgatactgaccgtataactgcacatgggaatcctcatggagcctgcgtagctcatggcccagtctttgtaacgcaggatagagccatgaaagctcctgaaggaaaatacgctctgctgaaaggtcttcacaaccggtatccccctgacatactcaaccgcctcattattcatatcctcaagcgcattctgatactccttcatggccaccgccatattcgcccccatcatcctgctcagaaaaaacaggccggcagccatggggagcagactgattaaaccgaaccgccagtcaaagacaagaagaaggacgataacggccgccggcgtcacgacagcccccacaaggtcaggaagctgatgggccagataagtttccgtctgcccggctccgtcgtcaataatccggcgtatcttaccgcttcccacccgtttaaaataaccggcgggaagacgtgtcaaatgatgcagcgcaaccgttttcaaatttctggccgttctgaacgccgatatatgggtgcacatcagggccgcgaaatagaccagcatgctgagcagggaatacgccaccgccagccagcccaggcgtacaaggcggtccccgttaaagccgcccggccagccaataaccgtctcccggattacattccacatgcacagatagggaaaaaggcccagcacagcgcttattcccgacaatacacagcccagtcccgtcagccagcggtaaccgccggaaaatgtcatcagcgtgattttacctgttcccggcagctccgtcattattttcctgctgcaatactttccattcactttcttatcctcctatattttatttcatgcggccctctcaccgccgtcgattagttagttttaactaaccaatgtatttaaaaaaacagcactagagcgagtagacaaaccggccgtttttaaccgcattgcttctcagtacttcttcgcaatataatatcccatttccgcagtccgggcgtggatgttatcctgccggtatactccaatgctgccaatcactttatcaccaaccgtgattgcaaaagcatagatctgattttcaccggcagccagcatcgcactgataaattctccggcgtctttttccgtatagggatatgcagtccgtctctcagattatcctggatatctttgttatttatcactgccgcaaaatcagccgcatctttcatcctccgcttacgaatcctgcattccatctgttttcctcccatctgctctgaagcgtgttaacaattcattccgggaaccactcaaagattcagtatcccggcccagcccgcatgctggaaccgccctaaaagaagcgcgcaggacaacgccctctccctcggaagatcatgggagataaactcctgaagctgctgaaaaaaggatcggcacaggatatgaaccagcgtgtcgtccagctccggcacctgatatcccaagctttttacagcctccacaaagtcgaaacaggactgttcctccaccccggccagacgggcaataaacgcctctgcgcttcccggcgctccgcagcacagcaggagtttgaattcgtcaaaatggtcataaatataatttatcatcgacagcacatgatggctggtgattccggacagctcctccacctgcttttccggggacagaacggcgaattcccggtggacattagtatacatatccaccagcgtctgcgacacctcccctgtaagcgcctcgaatatggcttctttacctgaaaaacaaccgtatatggctcctgtggtgaccgacgcttctgctgcgattctccgcaacgacgctttctcatagccaaaggtcaaaaactccttttttcccgcctccaggatagccgaggccgtgctgctgctttgctggttttccattgtatcttcttaaactccttaaatgtaacaatgttatataacaccgttatgatacaccgtaaagagaaatcagtcaatatcctgcgctgattccttttctcaataggatgccttctgtttgagacgtgcgtaatactgttttgtcatttcaataaaatcctgggcctggggcgtgataaatgcattctttttatagagaatcaacagcggaacgcagaacggcggatgatccaccgtaaaaaacgccagccggttcaaatgcggaacctggcggatgccgccttccggaataaacgtcaggccgaagccctcgctgaccagattgacggccgtcgtactgctggttgtataaagaatatcacaatttaacatattcattctggcaaacagattctcggtcgcctgccccatcacatgctcattgggaagcaggatgaaacgctctttcttcagctcctgaaggtttatataggccggattttcataagatgtctctatccccgctgccgccggatggattttattggcaaccaggaacattctctcataaaaaacaatctgatagacaaatccgtcaattttgttcggaatattcatcagggcaaaatcaatcttatcttccctgaccagtccggccagcgtattggaatggtattcatgcagaacaatcctcacgtcagggtgggccgcggcataggcgggcagaatgtcgggaagcaggacggagcccctccacggcgtcatgccgacattgagaatctgtctgctgcctgttctcagttcctctatctgcgattcaaacttccccgtcagatttcccaccccttccagataactcagatacagtcttccggcatccgtcaggacaagcggagtgtggctgcggtcgaacagcttcatctgaagctcctgctccagcctgccgatacactggctgagatacggctgcgacaaatacagtttttccgctgcccgggaaatacttccttctctggcgaccgtaagaaaatactccggattcttcgtatacatcttttctcctccttatcagggtttctcaaacattccctttgctcatagcaaattacttatatcgttatgacagattcggtaataggcaggccaatccaaacatgatatagtgttgtcaacgatgaaaaacaacaaaattcaccgcattcaacaaatataaaccttttgatttcctttaaagcccataatagtattgcaataccctttttgtcaaggaagggaatcaaaaggtttatccctcacaatttcaatgccgtaggaaaggagacttatcatgaaacataataaacctgtatctgtaaccacttccccgcttcccgctccaagaaaaccgtgtcacatctgacagaagcggaatccaatctccttcttgccagaatcgccggacagctcggcataagcgatgcccgcagccttccttatatggcggcatttagcggtaacaaataacagatatacagcaaaatactgctcattataagtgcggaggcgatgacgccaaaaaggagagtctgccgggactctcctttttcattcattgatggcggtgacctgtgcacggatcgtgcaggttatcgtttataaattttatgacaggccgataatttcatccaccggcagggagagaataattcctttggccggtgtccggcatccgcacttctcgctgatttcccgcatcacttttttcttaatctccctgggtacaatgatgctcacaacctcctgctcctcctggatggataccccagaaactttaaaggttcttccggcccctgcctccggctcttcataatagtgcctccggtggctccggctcttctggccgcctccatcacttctccgctgtatccctggctgcaagccgtaagtatcatagcatatgaaatatcttccttcatatcctcctcattcctttccccgttctcttctgcaatatccggccggttctcctccagttttttcagcagataactctggaggccgttgataggaactgtaaatgcaattcctctgcccttttctctgattctcatcttctcgtccaggtcccggaatataccgtggactgaactgcgccgtacaaatccggttgtgattgccctgctgatttcgctcagaccgcatatttcaagaaattccgaattggcggtacctttccccctgaactgatatctgaccggcacccggaaatcatccagtatttttaatacttttctttccataggcatatccgtaataatcaccagcattctcaatatataaccgcagctttgcccctccatgcttactcctcctccagttcgataatctcataatccgtgtcttcaggaacctcagtctccaccggctgctttgatttataaacgtacagcaggcctgtcgcctggatggcaataatcggcgccagcgccacaagcgccactacgccgaaggcatcggtcgtaatgttcccgccgacacccgtacatgcgccgatggccatcggcaaaagaaatgtggatgtcatggggccgctggccacaccgccggagtcaaaggcaatgcctacaaaaatggggtctgtctttctcgccattataagagccagggtatatccgggaatcagaatccaatagatgttaaccccggtcagaatccttatcatggccagccccaccgctgcggccacgccaatcgaaaggcagcggttcattgaatccctggacaccgtaccgtttgtaatctcttccacctggttgttcagtacctgcactgccggctccgcttttacaatgtaaaaaccgaccagaatccccaccggaaccagcatccatttaaacgggcctccggccaaatccgctccaagccggataccgaccggcgcaaatccggtattgacgcctgtaagaaacaggattgttccgattaaagtgtataatagtcccaccagcatgcgcaggatctgtctgccccggtactgtctcgtaaacagctgaaataccgcaaaaaccaggagaacgggaaaaataatcaccgatacctctttaatgtatgtcggcagagcgattataaactggcggaccacatcctgcatcgtggcaagttccactatctcagctatggaataggatgcgtccccgggattgtagaaaatactcagaagcaataccatcagaatcggcccgatactgcacagggcaacaagaccgaaactgtcactgtcgctgttcttatcgcatctggcagatgaaaaaccgattccgagagccataataaagggaactgtcataggccctgtcgttacaccacccgaatcaaaggcaatggccgtaaaatcggccggcaccaaaaatgagacgagaaacagaacaggatataagactattaatattttcagaagactgatattcagtaaaattctaagaactgcaataatcataaaaattccaactccaaatgccacggtccatacaagaacggcatttggtacggacggaacctgattggaaagcacctgcaaatccggctctgctacagtaataatcatccccacgataaagcagaccacaattgtaatcaaaagattttttgtccgcaccaggtgatggccaaccccttctcccaaaggcatcatggatatctcggctccgagctggaaaaaccccatgcctacaattaaaaaacaggccccggtcaaaaacaatgcaatcgtccccacatcgataggcagcaaaaatatactcagcagcaatacgactgccgtaatcgggaggactgtcgataaggattcctgaatcttttctttcagctttttattcaagtagccctctcccttccagtgaacgtcttgttgttataagatattccgttattctccagcagtttcttcattcctttcatctggaatttcttcattttcttcctatgcagtttttattttccactaatttgcggcagctttttccggtgccgtccttccctatcaccgaccttccctatcaccgtcctttctttctgtctcagttaattctactacgattagcaaattatttccgggcctttatccgctaatttgctgtttctgccggtctattgttatttttccggttcaattgtcgcttctgcatttttgtgattatatttgttttattttctgataataaatttcacttgttatctatttcatataatcatttctatttaatcaaaatttcttcaaattcatctcttcttactcaaattttatcatatttctattcacctgtccatgcgcagatataatttgcccgagagactaaaagggcggtaaaatacgcaatatgcgcatcttaccgccatccggcagatatcctaaactcccgaaaagaggccccaggcaggctcttttaactgatatagagtatattaacatctcccaaaatccttttaacctcagcccgcagaaatgtttcagcttctgccctggtatcttcccgataacagtatcttcctcttccccggccggtcataagctcctgattatacagatccggcgctgccgggaacgcatctgcattaatagcccggtgtataaaggaatatgtcatcaggataatttccagaaacatctgcttcttcattttttcagtcaaagtttcctgcaattcctccagcaggcccgtatataattccttccatccctccgtcaatatcacgggcgctattaacaggccgcagggatatccggcttcacacatcttattgaccgcctcgatccgctcatttagtccggaagttcccagctctatccgctttatgatggattgcggattgacactcatgcggaaaatgatctttcctctgtgttccagcggaaggaggggatccaccatatcaaattttgttggaaatgtaagtttaccggttccctcctccgcaaatctgggaattgtatacatcagattatcagtaattgtattttccagcaccagatcgctgttactgccaatctcaaataccaacgggctgctgtcctttcccttcttgataattcggtccagcatctgttccctgttgacaaacagacgcagataagcgcacttattataattgcacacaagataacagtacaggcacatagccgtacagccggatgatgtgtaaggcacaagataatcggacactttatggttttccacatatttatgggtttttcgaataccgatgattaaattccgcttcatttttccaaactcagaattcggtttttcctgcatttcctttatcgaattatggctggcaatgggaaaccatggcagaccggcatatttttctttcagctctctgccaagctcatagttcagactgtcgggctcataataaactgcatcgaatttcataattttcctttctgtgcaacggcttgtcctgaattgcaaaccagataatccggcctgcatataacgatagtatatgcccttttgtgaaaatcatgaaaagcacccgtctttaagctcaaatctgtattaatcttaattcaatgcaaaccatttcaaagccgcgtcaccggcccagtaaccggctctcaccaatacgaaattccagatgagtattcctcctgccgagctgatagtatacaatagaaaatccattttcactgctccggccggaattgagatgatcgtacgcgctaccggaatcaatttgcttataaacacactcatagccccctttttacggagcatttcaaggtatttttctatgcgcggtctttgccccggaaagcgtttcaaataccatggtataaacaggccgcctccaagtctgcccagaagatataggagccagcttcccaaaagaccggccagaactgtgattatcataacagtcacaaagctgatttttcctttggaagcccaaatgcctgcaagaggcatgataattcctgccggaagtcccggaagattcatatattccagcaaaactaacagaaaaataaataatgcgccgtattgtaaaaaaatctgagtcagcatttgtatactcataatgaaacctccttaagccaaggcaagcttatcagaaaaaaagaaagcgcgtctccgggaaaatggaaagaaatagaaaagaacactaaaaagattatatgaattattaaccttatataaaaatttaaaagacatgacggtttacaggcataagaccatattcaccgacaactgctaaagcccgtttaaacaaaacgctatgtttgtttaaacgggctcattttatgcattcacgctttgacgctatcgggtatccttaccggaatgaaccggctttatctgactcattacgtcgcttatacaagccgtattacggtaagtgtggcaccgttgcctgactgtaggacggctgcccccaccagaccaaaaagctggagtgtaagcgtatcgcctgccgtcaaggcagcgaaggtagttgctgcaaaagagctgaccgataaggccggtgtgaaggtagatccgcccaggggcgttccgttgcgcagcaccctcgttgataacagcagcgctgccgtcgtcgatactctgtaagaaaccatataggttcctgttgccggtacggtaaatgttgtattttgagcagttgtcgtaaatccgtctaatacctggaaatccggcagcggtacggctgttccgcccagaataactgttattgtgtcccccgtcgagttggtcgcgttcatactgttggctgtcacggaagttccggtcgctccggttgggcctgttgctcctgttgctcctgttgctcctgttgctccggctgctcccgttgctcctgttgggcctgccgctcctgtcgggccggttgctcctgttgctcctgttgctcctgttgggcctgttgctcccgctgttccggctgctcccgtcgctccggttgggcctgtcgggccggttgctcctgccgttccggctgctcccgttgctcctgtcggacctgtcgggccggttgctcctgccgttccggctgctcccgttgctccggttgggcctgtcgggccggttgctcctgctgttccggctgctcctgtcgctcctgttggacctgtcgggccggttgctcctgccgttccggctgctcccgttgctccggttggccccgtcgggccggttactcctgccgttccggctgctcctgttgggcctgtcgggccggttgctcctgctgttccggctgctcctgtcgctccggttggacctgtcgggccggttgctcctgccgttccggctgctcccgttgctccggttggccccgtcgggccggttgctcccgccgttccggctgctcccgttgctcctgtcggacctgtcgggccggttgctccggctgctcccgttgctcctgtcggacctgtcgggccggttgctcctgccgttccggctgctcccgttgctcctattggacctgtcgggccggctgctcctgttgctcctgtcggacctgtcgagccggttgctcctgccgttccggctgctcctgttgctcctgttgggcctgtcggacctgtcgggccggttgctcctgccgttccggctgctcccgttgctcctgttggacctgtcgggccggctgctcccgttgctccggttggacctgtcgccccggttgctcctgccgttccggctgctcccgttgctcctgtcggacctgtcgggccggttgctcctgccgttccggctgctcctgtcggacctgtcgggccggttgctcctgccggaatggtaaacaaaagctctactccgctcggtgtaacattttcataaactgcggccggagttcccggttctcccgtaattgttcctgctaccgtaacggtcggtgtccttccggttgctccggttgctcccgtcgctccacgaaggccctgaattccctgcggcccctgcgggcctgtggctccgggaatcccctgaggtcctctggctccggttgctccccgaggcccctgaggtcctctggctccaggttcaccgggacatccccgtggccccatcggtcccggacagccccgcggccccatcggtcccggacagcctcgtgggcctgttggcccctgacagcaaactcttcccggaccaggacaacatcttctctccgaatagtctcctgtactatttccctgacatctcagggactgattttcctcctgcccggaggaagaagacatatccggatttccacatcttaaattattcatatcatcataattcataatatcacatccttattattcagcagttcatactgctaataacagaatatgccattgtcctataaaatgtgcagggcagtcctaccgggaaagctcctcataatcctccctgataaaccgatgataggtcagaccaaattcatccgattccacacaataaacataaggctcaaaatcatcattctcaaagcagaacacacatcccataccttccgcttccctgtcctcttctctgtagctttctccatatttatcagcaaaatcgctgaaacacctccgaactcgttcaagcgaatgttctccgtccgatatagccgatagaaaatttttcaaaaattcaggctccggaatttcttctgcaatgtaagcacatcccttttcaggtatctcaatgcaataacgttcaccctgacatgaaaaagcagtttctcccaattgcggataaacttccctgcaaaatttctcaagcgctccatccagttgcctgcgcgtggcagactgctctaaacccagcagacttttaagtgattcagccggataataaagaccgatactttcatccagacttccaattttcatctgccattcctttaccgtatcatatatatgcctttttaaattctccgttcccatagctctcctttacaaataacacgtttcaatgtcggtttcctgattgctgctttgtgtatagcgccagacatgctgctaaaacgatcacttccgtaatcggaaatgtgagccacacccattcaaggcccgcaaaatgcaggaaccatgccagaggaacaagcagaaccacctggcgaaggagcgtgatacagatgctttccttccctctgttgattccctgaaaataaacgctgaatatcaggccgaatgatgcaggaataaagctcagggcaatgatacggaatgccgtagtccctatcgtaagaatctcttcccgagttgaaaatattgacaacaatgatttcggcattattataaaaaaggcagttgccacaaccataataacgctcgacataacaattgaatatcgaagaacgctccttgcccgctccatcttccctgcgccgtagttatagctgattaagggcagaattacctgctgcaagcccaaaagagggataaagaaaaacgtctgcagtttataataaattcccagaaccgttaccgcatcttctgaaaataattttagaatcaggttcagtcccacaatgtaaaccgtatataacgactgcagcagtatcgacggcatcccggccttcaggattctgacacagttatgcagagtcaccctgccaaatgacggggagtatcgtctgataaatccaatcatcacgattgccatcgccagccattgtccaagcacagtcgcaacggccgctccccttactcccagctccgggaaaccgcaatagccgaaaatcagaaagggatccaatacaatattgaggacagctcctgctacctgagcacacatgggcagaaccatatcacttttcgcctgcagcattttcgtgcctgctgcctccacaaacatcccagagacagtgcaaaaataatctgggcatattgtatgccatattccctgaccaattcctgttctgatgaaatctgataataaatccggatacccggtgttcctgctgctgcaaaaatcagtgctcccataattccaagaaaaaaaccagtcgaaataatatccttctgcgatttggtgtctccggccccgtccattctcgaaatcagaatattaattccggcccctgttcccgtcgccaaagcggtcattagcagctgaatcggaaaaataatagaaagggctgccagccctccgctgaatatctggcaacaaaatagctgtctactatgttatagatggattgaattaacaatgccagcataaccggtgcagacagtcttataagtaatttccataccggtgtctcttccatagccatactgcatctgcctctttcttttctgctttcttttcctcttttattcgtcctttgcctgctctgccgccgttataaacgccaaattttgcgacatactgcagaacttgcagctttccgcaaatcctataattttatttaagcttgcttcattctaccatacaggacagaaagtttccatcctttgcattttattcccgaatacaaagagccaaaaaagactccaaccaattgacagtggttggagtctaaacgattataatttcttttgttttctgactgtcagtacgacagttcttccgtttatatttacaaatgttatactatactattattttattactatactaatacgtttagtttaccgtaacaatatattgctatatcaatatattgctctaatttattcctatagtttgattaatagttacagtacagcttaatgattcttattcaattgttacttattatatattactcaatacttattacttatcgtttattcttaatactctatactgctttcttttctgctttctctcttttcctaattattttttctatctttccgtactacactcaaattcttttattacatcagttaccgtatctctttattacctctgttcctgccagccatcagctggctgatgttccatgtggcccatctcccattctactttctaaacaatcgttggcagtatgctttaccgctgctattgtaatatgagctctggcaatcatctgtaaatcttcttccttataatggatattaagtctatacattggcatactgttcacctccttgcttataatagtcagatttaaacgattttttcattctttttaaccaaatcaatcacttaaatcccctttattatctgtttataattatacaacaagattctttgcgtgtcaatatcaagctctgattaatatatttcttttgcgtcagcgggcagtttctatcttcccggccagcatctgataaagcagggccggattgatcggctttgccaggtgtccgttcattcctgccgcataggcccgtaccacatcctcatggaacgcatcagccgtcatggcaatgatggggatgccggctgccctgggatgtcccgatttacggatcgcctccgccgtctggtatccgtccatctcgggcatctgcatatccatcaatatcaaatcatagctgtcaccggatagtaagaacttttccagggctatcttcccgttttccgcataatccacggtaatgccggtcattttcagcagctccaccgcaatctccctgttcagctcgttatcttccgccaggagtacatggcggcccgccagttccggatgctccgactgggggccctcctccggcagcatcaccgttctgctgatccccgtcaccgaaagcagggtattatacagtgtggacgcaaaaatcggctttgccagaaacgcatttgccccggccaaacgtgcattctgctctatagtgccccagtcgtaagctgttataataataattgttgtatccggacctgcaatctcccttattctttttgtcacttcaattccgtccatatccggcatcttcaggtccaccaggcagacatcatactcttcccccatctgatgggcaatcctgaccttctccacgcattgctctccggtcagaacccaatcggatcgtatccccagatttttcagaagaagagatgcatggatgcagctgttgcgatcgtcatccgataccagcaccttcagtgactccatggcaggcggcttttgttcctccgtgttatcactgctttccggaatgtcaaagtccagttccaccgagaaagcagtccccttccccaattcgcttttcacggagattgttccgcccatcagcatcaccagattcctggtaattgccattccaagaccggttcccccgaacttctgtccggtagccacactctcctgttcaaacggagtgaacaggcgtttcataaattccctgctcatgccatagccggtgtcgcagaccgtaaagcccaggcgcacccggctgcgtttccgctgtatctgccttatttccaaacggatcgtgccgcccttcggcgtaaatttgagtgaattggacagcagattcagaagaatttggttcagcctcatcgcatccccaatcataaccgtctcggtcagctcaatcagcggtacggtaaagagaagccccttttcaaccgcctgaggatagataatggaggtgatggattcggcgaccgtcttcaagtcaaatgcctcatgcgcaattttcattttccccgcatcaatttttgacatgtccagtatatcgttgatcagagacatgagatgcttggaagaatacccaatcttctccaggcagccggccactctctggcggtcttcaatataggctccggcaattgttgtcatccctattatggcattcatgggcgtccggatttcatgactcattctggataaaaaatcggtcttagcgtgattggcccgttccgccacagccagagcgtcctttagcgcctccgtctgctccgtcagttttttctgcattctgcgaagctgagtcacatctgtgatgtcaataagaattgcaaaataaacagggcctccgccctgccagtccacacagcctgcattcacctgcagccagaatgtctggtccctgagatctctgacctgcacaacaaaatgcagcggttctcctgacagtatatttcccttttgttcacttataacctccgcattatccaataaattcctacggtacagttcatctgttcccctgtcccgaacctctccgaagtgttcgagatacctgtcatttgcatcaagcagaatcaaattaaaatcatcctctgttttttccacccggtactttgccacaaatcccggcagattttcataagtaaccgactgctccttgcgtatcctgaccacattatcaatattcgtcagcacagaataagcgacctggtaaccatctatgtattcatctgcaaattgagttgaaaactgcacccagacataatccccgtttttcttcctgagccgtgagaccatctgatagccgctctgtctgtcctctattgcctttaagaccgtctgtgtaagcttcttccactcttccggagcatccgcgtaatacaaatccggccggttatggaaacgttcttcatactcctttttaggccagccgatcagtttataataaaattcatttgcccagataagggtaaagtgctgatccagcagatgcttactgacgctgacccccatcaggcgcatcagcgtttcatattcatagccggcagatgctgcctgcatatcattcttttctatttttaccgctttatccggctcttccatctgttgattcctcccgttttgaagccaccttgttcatgtacgtctcttttagagcatatcacaaaagcttcaaaagctcaatgtactcctggccttttaatcgggataatgataaaataatgattgtattgtaatcatctgcataagttcagaacaatggaggttcaaaacctttgaacaagaagcatcaaatctcaaatctgatatacgatttttttgtaatgcgttttcaattcaggcattacaggtatggggtaacgctcccctccatcgattcaatctgccgggagtttaatgtctcacaacagactgtaaaagctgctttccggcagttacgtgaagatggcttcatcgacatgcacaacggcaggcctaccagagtgattttccagcagactgagcaggcgtttcatgaatccgttcaaagcttttattcgaagcgcaccgctgctttcccggatctgtttgaaacatctgctctgattctcattccagctctcatggaagggctgcgccgcaccagtcaacaggatctaatacagctcaagagctttttaacccgggcagatacggatgatgccctgtatttcttctgctatattctgcagaagctggaaaatcctcttattatcaatctgcattgggaaatctctttttatacgggactgatattttttgacagaaatattgatgaaaatatttacagcagaaagctggtagaaaaaggaattggggaaataattgactgcacaatgaacagggactgggacgggctccgcagcacgctctttgctttccagaaaaacaccacggaacgggctattagttacatcacgcggaatataacaccggccgccgggcaaattccatttatctggagaatttattatggccgccctcagatttgttacagtctttcgctgcggctcctgcatgaaatctatctgggtaaataccgtgagacgccatatcttccttcctatgagaaaatggccagagaatatcaggtttccgtcagtaccatgcgcaggaccattgatgtgctcagccggttcagggcagtggaatcagtcaacggaatcggaacccgcgtatgcccggccagtaccgaaactcccgatttcccaacacctgccgtccggcgcaatcttgcccttttcttccaggtatttgaattaatcatcctttcatgtgaagaagccgcctgcgccacttttctccggctcacgcccgacgagaaaagcagcctgctttgcaggctggaagaaaacctgcgctccggcagatgtgcattttcactgtggcacattctcctttgtatcgcaatgtactgccccataaaagggtgccgccatatctattcaaaaatatacgggctttttctctggggctatccattaaggacttcccataaagaaacggcctggcttgaaaaggctgacgaggaatttactaaagcaatagcagagtgtatcgggcagaaccgcttccgggaatgctccctgattgtcagggaaatgaccatccgcctgttccacagggctgaaaattatctgctcagccatggtatacaggaggatgaattgcgactttccccggcaatccggatgatgataccgggtgaatcaggaacgtaattccatacagacggtataaatggcagtaaacacacggtctgtacggcgctctcagcggccgagggtgccgtacagcctgaccagccatttccaggtgccgggaaacttatcaagaattgcctgccttatctctactgaggatacgccgttcttcagtggaaattcgacagtccccctgacctgatcgccgatggcaatcacacctctggccgctcctccggccgctaccctggatgcggcggcgcatccgccgagtgaataaacgccaagtgccagaccgccggctgcaaaatatccaaccgccaggccgcccagcgctatggttccgattgacatccctcccacggagagcagcagtgcaattgaaagtcctccaatcgagacaattcctcccgataatcctccaattgaaatgattccggctgataaaccgcctgtgcttataattccgaccgaacagttccccaccgctatcactccttttgcacggcgcagacctctccccacattaatatgaaccagcggcagtccccggaatgtggttttactcttatattcataattccatccggtctcatgaatatatacaggcgccgtatccttgcgttcctctatccctatcagccggtcaactgagatttcaaataaactgcttaattctatcagcttcgcaagctccggtgtggtgtcacccgtctcccattttgatacggtctgcctcgtcacaccgatctttgccccaagctgttcctgtgaccagcctctctgttttctcagttccattaattgctctctgaattccatatgatttacctccggccgtttttattagtcggcaaaatttctcagccagcaaaatcatactattttttgttaactatttctaccatttgcagcaggaaatctgtcaaccagacttaacattatggtaaaattcccttatgtcatatgaaattccgttcatttttacttccagagcttacattgttcaattcttcttccattatccccctggttctcgtcatatgcaaattgtttcagtaaatcacagggaaattcaccgcagtggccgcagtgttccttttcttttgattcacaacaggccttaaccgggcagctctcaccccaaaatggtttcttaatatgtacgcatcctccgcaattcatctgaaccttatattcgcattcactgcataacagcccgcatctcgattcaatcatttcctcttcctcctttgtttttccactatattatcaaatggaacatgacaggtgtatggcatgttgcttcggactgttttatgcggaaacagcagctgtcaactcactctgatgacagctgctgctttaatcaaaccgttattcccattaaagggccatctcgtaaatacggcgtacgtcctgcttatcaagcggcacaaagccataagccaaaccgccggccgcggctttcattgccatcacatcgaaatgtgtatcatcgatgtcaagctcactcagatgcgacggcattcctatcgaatcgaagaactccctcgtctttgtgatagcctgcctggcaatcgccatatcctcctgttccggatcgatcccccacacatttacgccatattcaacaaaccgcgggagagtctcctcgcgaagaacatattgcatccaatacggcgtgagcagggccagtccggctccatgggtgatatcgtagaatgcactcagttcatgctccattggatgcaccgcccatgcggcatcttccccgtaactgatcagcccgttaattgccaggctggacgcccacatcagattcgcacgcgcctcatagttatccggttcctccatggcaaccggcgcatatttaatgcatgtcttaagaatgccttctgccatcctggcctgaaggtaggctcccggcaccctgttgaaataattttcaaaggtatggctcatgatgtctgaagtaccgcaggcggtctggtattttgaaacgctgaatgtgtattcaggatccagaattgaaaataccggtttcgtaatatcatttccggttccccatttttcatttttctccatgtccgatatgactgcaaagccgtccatctcggaaccggttgccgccagagtaagaacggacgcaaccggaagcgctttcgttatcttacgtgcatccagcacaagctcccaggcatccccttcatagcatgcgccggcagctataaccttggcacagtcaatcgtgcttccaccgcccactgcaaggactccctcgatgccctttgcacgacagatttcaatccctttgcgcaccgactgaatacgcggattcggctcaacgcccggcagctcggatactgtcacgccggcccggttaagctcatcaatcacctgatcataaagaccgctcttcttgatactgcccccgccgtaaacaagcaggatgttctttcctatggcagttatcttatctcctaataccctgattttccctttaccaaaatagatgtcggtcgggatgtgataattaaaattcttcatggattcttttatcctttctgcgaaatgaattgctgtattcattataacaaaccgggtattttaattcaatatgcaatccgtttcatgacgcatggggcctacgcggaaataaaatgcgaaaccgcatgccgtcctccgtattttccatggcataggggaattgatggagttccagcaccatgcgtacgatggcaagtcccagaccgctgcctccggtttccctgttcctggactgctcccttctagtgaacgcttcaaacaggtccgcaatctcctgctccggtatatggactccggtattctcaaccgtaaactgcacgccctggtccgtatcctccacccgaatatggattttttccccagccggcgagtaatggtaggcattgctgatcagattgccgatcacttttgcaaacagcctcctgtcggctgaaatcatccttcggggttccatttccgtgatgatatccatgtttttttcagaaaagaggtctgcaaaatcctccaaaattcctgaaataagggccggtaaatcaaaggtttcaatttgtgccgtaaaaccggaagctttcattcttgtgacagtcagaatctccatcacaagctgctccatcgaacaggtaatctcaaatgaccgttttaaatatttgtctcggtctttatagccgccgacatgataaagcattccctgaagctgcccctttaatatcgtgattggcgtctttaattcatgggaaaccgcagagaaaaatgcaagctggcggctctcaagctctttttctctcgccacatcctccaaaagcatggcatttgcatttttcaattcgtccagggccgccgacagccgtccggaaagctcattcagattgccggccagcatcccgatttcatccgttcttttttccctgcactgaacaccgaaatccagcgccgccagctttttagacacttcggtgatgcggagcaccgggcgggtgatatatcttgagtaaaacagggaagtaaccaaagcggtacagattgcgacagcaagtaacggcaggaataccttatgcagagtggcggaaaactctctggcattttccctgatttcgaacgtgtacggagaattgacctctgtccggaacgaaatgattttatcattgcttatgccgccgtactgtatgttatgctctgcatcattcttctccgaatcgttctgtactgaattaaccgacattttttccgcttctattatataatacctcggtacatacatgatgataaatccgtaggtaactgccgatacagccagaaacaataaggttgttatcagaaatattttaactgtcaaatggcttctcatgtatcctatcaatacggtacccaattcctttcacggtctctatataatctctctccagtttcctgcgcaaatttttaatatggttgtcaaccactctgtcattcccataaaactcatatttccacagcttttccaacagaagttccctggtcataaccttgccctggtggttcagaagttccctcaatatttcaaattcccgtttcgtcagcgctaccggctcaccatcgacaaaggtctgatagttatctaaatccagacacagatcgcggtagatgagtttctgattctcaccggcttttgcccctctcccgcttcggcgaagcacagctgcaattttcctgatgagaaccggcatggaaaatggttttgtgatataatcatctgccagaagatccagacctctcacctgctcctcctcactgctcagcgccgttatcataattacgggaatattggattctttccgtatcagttcgcagacagcaaatccgtctatcttaggcagcataatatcaagcaggattaaatcgtatctgtctttttgaaatgccgtaatcccctctaacccatccctggcaacggcaacctcatatccgctgtcctccagaaaaaaccggaggagttcttctatatcccgttcgtcttcaattatcagaattttactcacctaatccaccttcctgctgatctgctttttcgctaaacgcggcgaaaagccacaaatcccggcagggatttgcagcttctgtctgtcgggattatttgtaactgatgctcacaatatactctccgttattacctgcattaatggtaaaaggttcagtaagttcgttgaccagtatgctccctgtcattccgtctttaaatgtaatttctcgaatctccccgccttctcccgcttcatctgccgatatgttcaccgtcttaactttacataccgcagaaactgcctccggcgaagcaggcgctgctaatgcgggcacagccgaagcggtgcaaagtgtaaataccgccatccacaaaaagccttgtttctttaaatttctcatatgcaattctcctttacagtatttttgtctgcatgcacagtatatcaaggcaatttgtaatccttatatctttcatatgttttttatgtgttttttcataatctgcaataacactgcataattgaattgtaacatatacgtcatcccatttccattcaatcgctctataacagaacaaaaaaatgccatgaaacacggaattaccagtatttcacggcatcagtgccaatgtgtgttttgtacaactcttccgggcggcagcagcacatttatcgctgccagtcacgtaccccctgtatatgaaggaaacgcgctttttcatagatgtaagtgtcaagcggcctcatatatgcatcaaagctatgggccgccacataaattcgtccccctcttacggctacaattacagggctgtgataaaagcccttttctttactgcccaactgaacaatatctcccggctgcacgcctgtttcatccgttacaacggcatatggcccgactgatttatttcccacaaggaaattatataaatacgtaacacccgtccagcttgccgtcctgtctgagctgctgttatagtaccaccctgttaccggcgtatagttcatcactttgcttccggcataaatacattgggatgcaaaattcgtacagtctcccccataatgttcaaaatccagatatctggggtttctgcccattgcccactgttttgcgtattgtaacacatcatccctgcgatagccggtttcccttgtcatgctttgcgacctgcggtgtgcttatttatattataatatggcggcgctgccctcttcgttaatttgcgtttcagcgccgttttatttgactgtctgtcctgctaattcccggcgaagagcaggcataaccgtttggatataggccaatgcaaaatcttctgaagtaatccaatcctcgacgtttcgctccgtgagtatcaccggcatcctgttatgcacatcggcaatcgaatgattggcaccggtcgttaggataacaaaccggttctcatctttaaattcattatatattccggccatataaagaactctgctgtcaggcagattaaaccggtattttatcttttcaccttgctgcgtccattcaaagaatccggtgctgggaaccgcgcatctgcggccgtgcaggcttttgcgaaacatgggacgctctcctgcggattccgatctggcattgattatgactcccttcgccgctccaaaacggggaaatccccaggtacttaactcaggcctgatctccccatccatacggcagataaccggcgccgtgttggtcggataaatctcgccctttttcatctcatttcccggatacctttcgtccagggatttaataatccgcatgatttctttatcctgttcctccgtataaaggctgtatcttccgcacatggcaaattcctcctgattccgttcttaactctggcttttcaggaaagcttccggataaatcgtatgctccgcaaccggatccaggcgggacaatttggcatctgtcagcataattccccgctgtactgcatagtggccgaattgacggcgtatcagatcgattgagcgctccagactttcctgtttttggtctcgttgtacatcttctaaaaatgagagctgccggtattccatgcgtgtcagactgcaggccctcacccccaggctccttaccggattctcaggtgcattcttttggaacaattcgaatgctttttcaaatattgcctgcgaggtacaagtgggaatagacagcctgccctgccgttcgtatgaaaacagggaattgtcccgtatgctgatttgaacgctccggcagtaaaaattttctttcctcatgcgttccgccacgctttctgcaagaatgtataatattatttttacatcgtcagcaccggtcaaatcccgcggggccgtcgtactgttcccgattgtcttgataatacggcgtgagtggacatgcgaaaccggtgactgatcaagtccatttgcaaaggcccagagcataatcccgttctttccaagcagtctttccaggaaatgcacatcgctgcaggccaaatccccgatggtcctgatcccgtactttagtaattttaaatacgtggccctgcctacatacaacagcatatcggcaggtaagtgccagattttctctttaaaatcctgtccgattaccgtggttgcatccggctttttcaggtcgctgccaagctttgcgaatattttattataggaaacaccgacactggccgttaatcccagctctgttttaatggtatttcggatttcgtctgcaattacttttccgtcaccaaacagacgtgaggaggcggtcacgtccagccagcactcatccagcccgaatgtttcgattttatccgtatattctccatagatttcatgtgcagcctgcgacatctcaatgtaccgctcatagcgcggcggcgttaaaataatatccgggcatttctgtcgggccatccataacggatccccggttacaataccatacttcttcgcctcgtaattcttagccagcactataccgtgccgcgcctcctgatctccggcaacggctaccggctttccgcgcaggcccggattgtccaggcactctactgaagcataaaaattattcatgtcggaatgaaggatgattggctgctccatatttagccgctccttgcagattgataggcttattatctgataatatctggattttataccgtggaatgcagattgatctgaattcagtattatcttgccaaatccattcctatcgtttataatcattctatggagacatagctcagctgggagagcatctgcttgacgtgtagagggtcgcaggttcgagtcctgttgtctccattgaaaagagaagccgcgtatttgcaagaaaccttgtatttacgcggtttttcattgttttaatcttagtagagttataccgatttaggtacgaaaatatcacacgaaagcataaagtatcacacgaaatatcacacgaaataaggcggccggatcactccttgccgccattatcatctataaattctacaatatcccctatctcgcatttcaatattctgcaaagcttttcagccgtaagcattgtaatgttcgcattatttttcaaattgtgaattgtcttcttgtcaatcccctctttaatgagcttatacgttgtaacattctctttttccattttatcccacaacggcttataacttatcattcttccacctctcttgcctttactatactttgcggcataggggttgaatatactgattatattcagtataataagccatattattcccagtttttaccagctttatcactgcaccaaagtagtacaataaattacaaaaggaaggggatactgaatgaaaaagaatcggattaaaaacaatctcatttattactggtccgttgttgctcgtattacaactggcttagtctgccacattatccatttttgcaaaacgggaaaattgccctgcaaaaggccgaaatatagccgggaagaaatacgcgaagagcttaagaaaattgctgaagagttaaaaaataaagaggccccagttgagggtccgggcctggagagtaggatatgcagggcgaggccagcggagagcttgtctcccggcgtcgcccatatttaatgatagcgcaggcttgttttttgccccctatttccaacaaacggataaggtggtgattttgtgactatttttatattattaattatttatctactatattttatatctattccatttcggtatgtctaccacatttattaaatataatactatgcaaaagtactaaaataaaaaattactcaaaaaatcaatacacaaattagctaaaatgtcaattgtaaatttgtgcaaaatgtcatatactaataatataaatttgtcgttagggaggtgagcgaatgtcgtatagagctattgatgttgcggattatattatttcaagagcatatcaacgtggaaaacctattagtaacttaaaactgcaaaaaatgttatattatgcatgggttgacttttataagaaaacttcacggcacctcttctatgaacctatttgcgcatggccattaggccctgtagttccggaagtgtataatgaatattgctcatacggtggcaggccaattagatttctaatagatggtactgatattagagattttgattcatatatcttagaccaaatcatcgataaatatgttgatattccagccagtgtgttggttaaccaaacgcatataacaggaggagcttgggatactatttacaaaaatgggattggaaatagggatgtaattccattttctttaattaataaatgtgaatcacagaggtaatcatgctttccgtagaacgtgaaaaaatacaagatagacttgaaaaacagctttataagttgtcggaaaagttgttaaatgaggaggaagtcagcggagtaacttctatatttaaagaaatctactctgctgattttcgtcataattattcggatttctttccactgattttaaatatgaataaagaagatacaaagtataacttagactatctttcttcgaatctggaaacgctaagatcatatgttgaagagtgtaaagatatcgatgacagcgagcttagtaatatacataaaaaatttgctaagctatgtgatcatttaaacttggaaataagtagagttttatattattctaacaaagaaaaagctatgcttatgatggatcaaaaaatcgaaaatgtgtcattgaacgtagaaaaaagcactgcaaagttagaggaggcaatagccactgcaaaagcagtccaaaacaaggctgagtctatacagaccgagctaatttctgttttaagcatatttgcagcaattgttattgcattttcaggaagcctaacatttattggcagtgctgttactgcagcttcaaacacttttattttaaaacttgtttttattttattggtgtgtgcaatttgtctttttaactctatcgttgtgatgctataccttattggaaaaataatcgggaaggagctttttttaggatgtaaagccgattgttgttcctgcacgcttcaaaagcatagatgtagtagcataaaaaaaattcgaatgagaattccgtacgtattctattttaatatattcgtgattctttttttaatagccgattttgtaatgtggattatctatcgccatatataagattttttattttagaatgcaatagactgaatcgtctactgcattccttttttaattttattctatgctatataccatatctccaaaccgccaaaccctccggcccgctcgtgccagcatgccccctccaacggcccatccaccgtattgtcgaggaaataccagtctcccggttcatccagcccgatgacgctgctgccgttccagcgctgccaactggtcagcatgtagccgtccttaccgaaaaggtaccagtgatgattgataagctgccactcattcgtggcatatcggccgtcagacttacggtaacggtattttccctgggtatcgtgttcccagtctccaactgccttctcaggcccagacaacgccgccttaaatgcatcccaggtatgtttcgtgtgattataaacatatgggttggggcatatcttacctgtcacgtcgtaatgccggataacatggtccgccgtgacgccgtacttagccatcagttcttttgtcagggcaatcgctgcctccactgtcgcgtcctcaaagtaccagtcacggctggtgtctgcctggctccccttattccgcacgcaaagttcgattccaatactgtttgtgttccggcactccgggtgcttgtacgacttcgcgccacaatgccaggcaatattcttatcctctaccgactgccatatctctccctcaaagcccacaaagtagtgggcgctggccccgatgcgctgactggcataataccggcagttggcctccgccccgccggtagccccacgtaatggatgacaatgtatttaatgcggcttaactggccggggttgtaattataaggcgtgagtaattgatgtatctgcattttaacctccaatcaaaaaggcccggaagctccaggtctatgtactgctgttgcccttaagctgcttgtacatctgattaataccagtagccgcaagccctgatacaacgcctaccgctgccgcattgatgatatctgttgccgggtaatcgggcatcgtatacatgcctacaacacccagagcggccccaattacgccgcaaataactggcagccacttgttgtctaccgatgtcgccttgacggccatagcggccagataacacagtgctgtaattcctgctacacttgcaattccaaaatccataattattcctcgctttcttatctgatatactgtgccataatatagataagtccggtcgccactgctccggccccggctcctaccatcgtgttaaatatcgtccgcttcatactgctccaatgttccgccggctctgcttccagctttgccaagcgctctccttgggcgctctgctcctttatcatcgcctgcatattcaacgccaattcccggacggacaggacaagctcctggattgtcttgctctgctcttcctggtcagccatccggtgtttaagcgaaccaatttcgtgatcatgcccttccagttttactgcaatttcttcgtctgtcacattcacctacctccttatcaaattattttatagtgcggccgttcctctccccaccaccagaaccgcagccaatcatccaagacaatccctgccagactcaccggcagccacagcaggcaatattgtggacatatctgccccaggacattacccggcagtctgctgtagtcccacacggcccagcccagacaaagatttacaatacatcctgtcataaactctaacgctgtaatcaaacaggcccctataactatctgcttccatagtggcatctgccagggcagtacctcattaataagtcccagacataaaaaacacagacctcccagaataaacatagtccaatgactccggccgcgccaggcaagttccagggaaatgtaaatcaatcctccgatttcgaccagtgccaggtgtttatacagggtccgaagcatccgcaccacctcccacaacggcagccatctgccgcagatacgccgtgagtacgtcagactgatactgctctggcacatctgcgccgtaaaacactgcctgcagctcctgagccgtctcgcaaccggcgatccacatgtttatggcattgcagtaggtggtgtgataggatacgtgctgcatggccgcctgtatgatagcctgcatgtccgctgcgctgtaataccggcagggcttaccgtccgcatgatactccagctgcgcggccccggctgccagctgggactgtttaccaaagaggttaagctgatcctcgatggtcagggcgtaacgctctgtgctgccgtctgccagggtgacattgacgccggagtagataagccgttcacagtcggccgccacctctgactttttagccgcctgtaaatccgacaaaggcggatcgtaaggctctggttccggcatcgggacaggctcttgataaacgctgccgtcattggataaccatactgtctgcccctcctgtcgataaactgtattgtatcccgtcaatgtatcagcttccacgcctcccgttgtaatgagagtgagatctccccagctctccggtactgcactctcaaagataatccgtagcactgtggccgactccggaagaatgctgctatagagatactccttttcattcattccaattcttaatttttccatactttcatttcctttctattttttatatataaaaaggtcccaaaggacctaattttcatgtttaaatggcgacataataactggagtagatagatttccaccggccaataccggcacgcaggaaattaccgttaattttccagaacctatgcgcggagcgccaaaagtatttgctatgtgggaagacactacaattactcttacatatgtagatgggttagtaatcacaggggcgacatcttccggattcaaaatcgctacaaacaggctgaaaccatctgaaaattggtggttttgttatatcgctatatataatcgatgaatccgaaaaaacaatgcaaaatggcgataacttttcgacatacaggtcttttattggccttgattttaatactattgaaaagacaggtatttactcagatggatcaactccggatacctccggttgtaaaaactatcccgtcaatataacagggctactatttgtacttaggacgcagtatgtttgcgcacaaatttattttaccaatgacatgacttctttgcatgttcgcgcccgttatttatcaaatgtttggtcaggatggagggctttttcccttgcttaaatggcgagatgcaaggaaaagtttccttccagtctggctataccccttttagtttgcggtatgatgaaaaatatcccgacgtcctatatgtatataacataaacactaatgaattgcgttatgcgcgactgacaaacaatgaataaaatggcgagttggccagttctatgattaaaggggctatacgtgtacccgaaaacggttctattcttgatacagccaaaaattttattggtagtaatggaatccattttctaaccgtagtacaaggaggggacattcctggcgagtttaggtatagctctggctttgtccttagttcttttgatactttatcaattgttattttcagccgagaaaacagcaaaattgccgttaactcctggatttcaaataccgctaacaagtggaccggatggcgctattttacaggctctgccacactgtaaaatggcgaaataggcacgcttaaatcagtatcaggtaccaccgttattggcaatggaaccagagaggaactagaggctacatctctcactttagagcctggagtatggataatcacgtgttacagtgaattttttgaaggaactattcctacaaattcaatttataatacaactttacgcagtaactctaatggtcgaataatgactgttcgcagcactacaacaaacggtggggtattaatgtcatacacgtagcaaagattaatgctgcagatacatttaaaataacctcctttgattacgatttcggaggcagtgtaaaattaaatataaatatgtatgccgtcagaatcaaataacaagtaaatggcgagagttttattgtcagggatggaatacgcgggaatgatgaccttaacaacattgttgtcccggggtattatcaacttagctcatcggcctccaatagtgtcgccaatccggctttcagaagtacatctattgttgaagtaatcacaacagactcgtacattgttcaaagacaaaccgggccaagtgaatctaagtatcgtttcagggattctaatagtaattggggggcctggttataattcaaattaaatggcgagttgtgttaccgtttcacgtcaaacgtgtccgaaagcccgatggatacctttaaaaaaaattggtcagctttgcctgaacttaaaacttctattggtgcagtggcaaatataaattttgccgcaggtttcattgtttataaacactctgccaattatggtgcagtatatatgttttcgtacagtgacgcttatccagttccgatgtttgctagacttgtaaacggcacatggattagtccataaatcgtaatcccgccgaatccaaaatagtaatttaactgccaaaaccttacgcaaatttacctgtttttcatctcatatccccaaccccataaaatattatgtcacctatcctgttttttggtatgccaaataagccaccctctcggctgactaaaaaaatgctttccatcaccccttaggcagcatatttacggtaagattcccggacattatcctgtttgatattacagtaaatcaatgtcgtctctattttggtatgccccatcaagaccattacttcttcgattcgcattccgcgattcagcaagtcggtcgcaaaggtccgacggaaccggtgtggatgcacattgccgactcctgcctttttccccaactgctttaccagatactgcactccagccactgttatacctgtatacggctttttcacggccgcaaacaagggcctttcggccagttcatcaactgttaatccttctctttgcatacggtccttaaaatatcggaaaagatgaaagcacgccacatccgacacatacaaatgcctctcttttcttcctttacccatgactttaaactcctgtttatataaatcaatatcgcctacctttaagctacaaagctcactcaccctgacaccagttgcatataaaaattcaatcaacgccctatcccggctgcgggtacatgacagtctcaatgcctctatttcttttgccgaaaaggcttgttttatagtactttcaatacgtaaactttctattctggcaatcggattttccgataccatgttttctttttgcaggaatgtccagaaactgttaaggtatcgcatcctcccctgcagcgttaccatactgatattgttatgttctctcaacattccgaagtaccacctcaaatccatcgttgtaatgtcctcgatatttttattcaaggcgtttcggcagttgcttatttcccttacatactgggccagtgtattgttctgccggccggatacttttttactggcaacaaacaacctgattttagcagtatcgctatccgttccagttgcctgcagctcgtttttttcttccacaatttttttatcgtggaactggatataaagcacattttgaagcttatccaactgttcttcgtccagacagttactcatcgcctggacaacattcatcaacatttcctctaacactcaaaaacctccttcctgatatctctacaatatcaaaaaagaggttctttcgccctgatttttgtaagattttctcagctaaattactattttgaaatattatttcgagttctgctgtcctgttacaacgtacgccaaccagttgggtaagcctatatgcaagttcggatgtatccatatttgaagcaaacgtaacataataatttgagaccacatagctgattattagtattctaagagcagtccatcctaaaggcttgtttttggtgttgttgtcagttatgccgcaagatagccctggggcaggaaattaatatcagaaatggtgttttctctagcgatagtttcaatctcgccattttatggttgacgaataaataaaacatttataaaaatcgcatcgctgtaactggtgccgcttaagttatctacatatattgttactgcgaattagatgatatccagcaagctcgtggagaactttagcttgtcttgtatcggtgatgactgctaaacaggtttatatccatcaggagtgtttatcgtatggttgccatacgctgttgccactcggaaccgtaagttttaattcagcaaagctgaaattttttttaaaggtatccatcaggctttcggacagttttgactaatacggtattcatcaattcgccatttaactgagtatacagatccatcaaaactttcccctgagcggcacttaaaggcaaatttgcattgttcgtcacgcagttattaaccagcattccaacggttaaaagccctgtttttatatttttaaagtcctcaacaaactttttcatctttccgaggaatgtttttggcgtatctcctgctgcagggacaggaaattctgttgcgatactgtccgctgtcacgattttcgtgttagagatgtctccccctgctgctattactcttttcttcagttctgtatccagactgtccgcattatcattaaagtcctgaatgtttaccggatcggatccttccggtttttttaaattataatttgttgtgtactgcataaattacctcctatttaatttcttcccaggttttccagtaaatcatgtcccaggtataaagccccagactcttccaatcatcgttctcatactccacttctcgcataatcctgatttcatcccaggttttcggcagaagctcattccaggtgaaaattttcaaactgttccatgtcgtataggtgtattcaaacctgtattccaggtgtgcaggcttaatatcttccagcatggcgacaaacgcctgcatattcctgggtattcctttaattcctataaaccgaacaataaagcggtggttctcattatcttctgccacatcgacatcacccccgctgaatgactctgcggtgcttttgatcatctgtcttgttgtcgttccctggccccttattttagccagtacgatttcacgccgctgctcataagataactttaaattagtcgtaattcccagcagttcctcccacctcgtaattccccaggcagaagtggaaacaaagcactgggccagaaggtcgtacaaatagtatcgaagcagtcccatttcccttccctgggtctggtatatttctttcatttctcttattgaggaaataaaagagggaacataaagcgacaaatctgtaaaatattcctcctgtatttccggctctaattcttccagggcatactttaacttaccgtatttttcaactccatacatatttacacccccttaagctggttccaggtgtatgctccgtgcatctgggcccaggagaacggccccttcggcatgtatgccccgtcatggttgtgatttttcgctgccgcatcggtaatcccatatccggccagcgttgtgggattcgttccggccgtcacatgtccttgagcatttacggttacgctccggtaggttccggccaccgctccgctgttcggatgcgcatatacggtgtcggtaaacttggctcccgacggcaccgatgatgcaatcgtatacgcggatgacttgatccctccgactgtcccgtctgaaacaagaactcggccagaaacaggcgtggcattgaaaacagcaatcggaagccaggatccccatgttccatttgtgcaatatctttcataagtcgttttagctgtcgcagataaaaatgtctgctttgttatgtagtctgttgcatatgaccaccgtaacaattctacctttaataaaaacggctgtccggaaacaggaatgttcgtaatattggccgctccgccgctcgtcttctcggaatagaactgtatttgcggacttccagacgataaattgtaactgtttgcatcaactgtctgtccggtgatatctattgctgacaggttggtatgactatgagacgaggctgcggcgccaacctgcgcagctgtcactccatgcggattacttttactactcacgtgggaaaaagcagcgttccagttatcaaacagtgcctgcgtaattttgtctaagatagatttattagcatgcgtgtggttctgactggtgtcaatgtcactttccttcagatatccggtatcattagtaaactgagacagctttgtaggcatgtctgagatctgcgacttggtatgcgtgtgtgatgacggcacaaaggttgctggcttgccggttatttctgtccatccataggatggtttagccgcagatttcgcccaggcggcgacgtccgacgcaggcatagacgtaggtttatttttgatgtaggcatccgacgctgtgtctgtcactttccagtctgcctgaacgttgacctccgcccctgcggcgattcctgccagcttgttcttctccgccgtggtataatcgttggttgagagctgtttacctgacaccttatcaaccttgttggtcacggcattccatttggtccgctcctcggcggtaatatgttttacggcgtcagcaagatgagcgataaggtcagcaaccgactttgccaatttcccaaatgccactgacagcttttctccgctggacaggagggaaagggaggcggccagggtgtaggtgacggtctgatcattggttgcgacattggacacatttccgaggcctacatcagcctttgttgtcccatgtggattagtccccgccggatgcgtgtacaccttcgtctctgttccgtttatctttatgttcccatttgttgcggaggcttctgttttcgttgcgtcggttctggcgtgtgctgcctgactgtgatcgtatgctgttttcccctgatcacctcggaaggcggtggtggatgagtttcccaaagcgactcccacgccgttggcgtcgaccactgtttttccgactgccccggctgtaccggccgtgtttggcttcacagctactgcatcagcgcctaccgtaacaccattcccggccccgacgtgtatcgtgcgatccgtcgataaatcgccacccccggtcaatccgttcccggcgtttaccttccgcgtggacagcacggctccatcaatattagcctgagccacggtccagtccgagtccagatttccgctgccgttacgatccgccaacgccgctaccaagtccccgggttcgcaacgctgcccagcatacgtgccggcaatgagtacccgataagtccaaccggtaagatacgtcgtcggcagggctgttatggttcctcctgttcccaaagtccccttaaaaatcattgcatccgacgctgcaattccccggctgattgcctcctggacaaattttgttgttgctatctggtgggtatttgtttctgcggctgccgaaggggccgtgggtgtgcctgtgaatactgggctggtgaacatagtggtctttgattcatttgtcacattcccgagtcccacttgtgcctttgtcactttatgtggatttgatacattccctttgtgggcagacaggtctgtactcaacacctgttctgccgtagcagctctggtgttttctgccgtaatagcatcactgtttcccttttcagcagctttcgctctggcgacttcagaggccaagttatctgtgagtttcttttctgcatctttcgccctagtggtttcagctgataatgcatcctcattcactttttctgctgcctttgcgcggttcacttcggccgtaagattgtcggttaagaccttctccgcagccccggctcgtctcgtctcctcagtaatttcagttgcaagtgtctgctccgccgcttcagaccgctcaatctcggtttgtagattctgagagagaacggcctcagatgccttcgccctctccgtctcttctgatattttctttaacaggatgttctccgcatttgttgcccgctcgctctcgctgagtaaatcactgcgcagtgctcgttcttctccttgggcgcgactactttcctcgtttagcctgtttcccagctctgcctctgtgtctttcgcccgctgtgtttcagcatcgagtgactccccagttctctctctgttcgggcagcacgctcatattctgagttgactgcgctctgagtttttaccgtggcctcctgcagccgatttatatcttcggcctctaccgtgtctccatcagtttcataactgatatacacttccaccacatcagcaaatattttaatgattctcttccagggagtcaggctgggcgttgacaacgaaaaggtttggatcctatcccccgtgagcctggggcctgtgtatatcgccagtgttgtcggattgatgttgtcatgctttagttcgccgttataaacgccatcacttaactgcaccttttcttcaatgacgtatatatttccatcgaccttatttaacttctcctcaaatctggtaatctccactacatcacctccagacttaccgtccccgccacagcaatttcatctttctttaactctacattttttgattcaccgttcagcaacagcacagaaaagtcctcaaccccaggaatgcccagtaacaagctgcctattctggccagacttacataggtcatctcaaatgcgttctgctgtaggaattcatccaccgctcggctaaaggaatcctggatagttcccaagtacaatccatctttaatgcgtatgtcggccgccacgttgattgctttctctgttgctgattccaccgccacggtggccccgatgggtcgcagcccctcaatgtgttccttgactttattaataagggcagcgcttgctccactgcggtcctcgtccgcaatgactacctttaccgtcccgggaccatcagccaggggaaacaccttcgccgctcccactccattgcactccatcgcccagttataatagtcatagacattgccactggtggatggtttacggacggcggccagatagcgcttccggaaggcctctgtttcctcctcatcgttacccggcgtgagaagctccgtcaactgtgcggtagccagtccaggcacatagtttatcggcaccattgtaccgttgctgtcattcccagaagctccttccgtctcgcaaatcattcgatagcctccatcctccaacttatctgacacataaaagttcaggctcccctgactgaatcgttcgccctccgcaatctcaatgtcatccggagtaaatcgccccctccattcggctgccactgccttatagggggtaataccatattcggccgctctcttcaccaggtattccctgtccgccgtatctccgtatacttctcggagcacattatcaaggcttatatacaggatctgtatctccgccgcggccggcgccagggcatcatataaaatggacccctcccgtttatcaaaagtctccggaaggcggtctaacatccgtttcaaaattttctcatatgttatatcttcaaacatcagaccttcacctcctttgctacctcaatgtctccgaactttgtatgtattgtgaatgaaacagccagctttctcccactggtctcaaaagaaaaagcatcgacgctctggatcctgtcatcctgcatcaatgcctctttaattctctttttcaattttgatttcacaagccccattggcttcccgaatagccctttcaattctactccataattccaactgtaaataagccagtcatatcgttctgtattcaaaatgcagagcgccgcctgcttaactgcctccagcccatccgcatatcccgtaatttgctccgcctgaaaccggtatgttttagagggcctgtcaacgatttcaaaatcttgctttaatatatcacctgaatccggtaacatggcattctcctctctactgccggtcaatcacaatgtactgctgcccaccgcgcttctgcagcagcatgaccggctctccaggctttaggcccgcttttacagtcactgtcactgtgcccaccccggtatgctcatttcccttgagtggtccatgaccgcccgggttaatagtagttgctggcctgacagtgtcgtcttttggtctattcggactgatagcggcgacgacgaaacgacagttcccaaaatcacattgcaaggatacccggcttccacggcctttaccgcgatttgccgcaaattctcaatccattctgcatcagccattaaaattcgcccctttcaacgttaaatccatcgagtggaaaccttgactgaatttatgtgtcacagcctccaccaacatgtaattcttcaaggtctggtcccctgcctttaaaaaagtagggattaggcagcccgcgcgcacactgatatccccgaaggcatcctttatttttaagctccttgatggcttgttgtaaagggagagatatgcctctgccgcctcttgcccgtttacactatcactgatagactcgtgcatccgaaggataccccacttattcacattttcagtgtgttttgccacatacagttcccgtttttttgtctcgttgtcatctcgatataactcgatttgattgtaggtgtggctgtctatgctggacttaaaatcatagtcttgcgcggtctcgtcgcagatcatcaggttcagtttcatgttctcaatattcttcaaggtcaaagcccccgcatcgtcatacagcacaaacagctttccggtccccatcattgtgatatccagagcgttcaggatgatgtcgaacagcgttttgtccttctcgtttcgaacttcaatccggtacccggtgtcttctagcgctcctactctcaggttgtaatctgcggcaatttgcgctatcaggtctcctgcagtcaggttcgtataattgtaactgtctgtgtttttgaaatagcgcagttgatcataggcggtgattttaacctctttctcccggcttcctgaccgctcaaaaataaagccaaaaaatgccggcttaccgtccacatccagccgcacggcgttcccctcctcaatctgaagccgatcatctgcaagcacagtaaaggatagctttcccggctgccccttccgctgcacttcccacgatacattcccctcaaccaccggaacatacacggtatcgccgttctggatataaataaccgcttccatccgttaatgtctcctttcttacggcagggtaaggacctgccccggataaatccgatccgggttgctaatcttatccgtgttcaaactatgtatttcaggccatcgagatccgtccccagcgccttcttagcaatcttccacagacagtccccgactgcacggtatatgtcttggccggctccggttcctgccgtggaggctcctcttgtgtgacctgcggcggctgctccgggacgatggtaaagttcatgacctttgtaccataatgattgtattccttaaggttgatggagaccgccagatccacgccttctttcgcgtcatccgacactttatagtcctccaaggtaacatctaagtttgtgtcaaaaaagccctgcccgccgaagccctcccgaatgatgataaactcaaactcggactgatcctctttcagttcccgcagccggtctaaaaatccctctgcatcatccacgccatcccaattcacgaaaggataatcggcctgggggattactgcatcaaaactaatttcacacaaccctggcggccgaatgatattgaattcctcgccgttaatgagatttaccgtcttgttctggttcccgtatttcatttggattttctgcggagtgatgggaaggcgcatgtcatctaaatagacttcgtacattaaatatgccctccttccgctgcaatctgtaaaaactcaccagtaaacgctgccagatagttgcccatgtcgtcaaaatccgtctgtttggttaaggtattattattattgacatctacctttaattcggccagggtaaaacggttaatgatttcttgctcggcggcgtcgcgcatgtatttcaggtcctcgtccatgatgtcgagttgatcggctatggcggctgtactcttggctgctcctcccgtattccctgcaatatcttccaaggttccccataaaattgattgccttcatctgcttttgccgcagcagagttttttgctttctctaaatctgccaaacgctgcattcgttctgcttcaagctgtctttcaaggttatctttatgggcctgacgactcttcgctgcttctccgtttttgtttttcaaatctgctaaatctgcggctctttgctgctgctttcctgcctcctctaataccgctttgctaccaaaatcagcaacccaggaaattgttggaatagctgccccagtaatactattcactgaattaatcagatcgttaatcatttttattgcgccatttacaaaaccctgaagaatcatcaaaccggaggctttcaggtttcctaacgcatttaaagcacctgctctcaaatttgagaatccatatatcatgttgtcgatactgttttgcatattgatttccgcattcaaaagccccagcctcattctgcctagctgtgtaagaacagcattgacgcagatgagccatgccacccgtaatccgccaactgattgtacccaacgataaatcgcggccactatcacaccgattacaattgcaatccagaacagaggattagccaataatgtattaaaaaacgccactgctgctcccgtagctatccattgacatgccgtatagactccccacgctaaggctgccgccgctatccctgcagcaacaccataaagcattggcgcaatcacattccagttctcatttataaaagttgctccctgcccaatcatttgtataattggccagaatgtctgtagcaaggtattttgtaccgctgtgattacctggctaaatgtcattggcatagaattgaatttagtatttgtttcctcagccatattgagcaacgaattttttacaacttgggcgcttacttttcctttctctgcatactgcttgatagaaccttccgcccaccccatcgcttgttctatagttctggcaattcctggcgctgcatccagaattgaattgagttcttcacctctgagcgcccagccgccattgcttgggacaactggatcattgcgtttgactgctcctgagcagaggccccaccaataacaaactgtttattgacctgttccatgaaagcaatcaactctgcattactgttaaatgcatttcccgcattcagtcccatctttgcaatagagtttgctgtatccatatatggtgctcttgctctttgtgcggaggcaaatatcatctgatttaaccgctctgtggattgaagaccatcattcatcaaattaagccgggcagtagtttgcgtgacactgtcagacagctgaattatcttttgtatgctaaatgctgccataaggccagcagcaacccgcgtaatttactctccaaaccagatgccgcgcccgtcccctttcgaatagattggttaaaacgttcctgtccatttatgttatcacgaatatttcgctccgtagtatcaagaacagaattcaatcttcggtacgcttcatttgcctcactgatatccatccgcgacattgagatattcaaatcctcttgtgatttaattgctttttctaactggccacgcaactgctccaactcagaatttgctttatcggatcgcagattgactggaatctgatttaactgctgaattcttgcgctaattgattgcatacggctttcaagctcatgcagatctttctgcataccagcaggagctactgtcatactattcgctttagccgatatttcctgctgtgtttgatataattgttgcgccatcctatccgcttcgccaaactcagccgcaaaccgctctgcgccactattcataaagaccggagacgatgctgatctattccatactggcattacaggctctggtacaggggtattacgtaattgttccatttcttctcgataccttattaactcggcagaagcctgggaaacactctgtcttgccgcatctatcgaagctgtccccaagcctttatccgacgctgcttgggcagcttcaaaggtggacaacataagagacattgattgtgtaatactattcaacactgatgacattctatcctgaagttgtattgatgtaccgattcctgccacttttattgcctccttttttatttattaaaatagacagaagcaccaggatttctcccagtgcttctgtctattatatactcaataattgccttttctttgtttcatattcgtcttgggtaatggcacccgcatcaagcaattttttatattttaaaatctcatccgcttcaaatgtggtacctattggttcattttgcttttttctttcggtcgcactcaataaataattatataattgagttaaatcttccggcttcatatcaaacggaatattcactttttctaccccgccaatatgtaaacacagatgttgtgagcacattttccctgattccaaagatatccctgatatgctgctcagcggataagacgctcgtccctgcttatatccaaaatctttactaaaaaacacaatacgtttatcagtaattataagcgcttcatatatagagcccatcattgtctttccaacaacagctttcacaatatccgaatgatccaataatttaagcttagaaaaaaacttaatggctttttgtggtaactgttcattcaaatcactttccccataaaaagtactgagcaaacccatgacttacctcctgtttttgatgcaattataccatatgtccccttatcttctaccgttttcttttgcttttcctcttcgcctctttggcagctttcttatcattttcaagcttcagctcaacagccgcaatcacatacgcttgctcttgtacatccagttctaaaaattcatgcggccatttgtgtaatttatggaggcagtagtaagcaatatttgcttcctgactgcctccatctattagttttttgcttcttctaccttttcctgtatcccctggtcaaatccattatagctctgaatacggctcataaaatcgttaaattctcccgggtcatcaatcatctctaagacaagctgttctgcccccatcaccccataagaatcctgaagctctttgctgttgaggttcgggaacacaacacatcgtgcagccagtttaactaaatactcattggcgttaaactttggccggtacatgcccgtttttccttttactggtatttctgttgtgcattcatcgcggagttctgcatcttcttttgttgtaagcgaccttacctcccacaggagcggttccccattttcatcacataaagaccgcgtggccgccaattttaaattctctttctgcttcttattcttttttaaaaatcttgtcaaatctcccatgtacttttctcctccttatttactgcattccttcgaggccagtaaactcttcgggcatctcccagctctcaaaagtaaagtcaaactcatcttccagatactctgcatccgcatcaaacttcgcgacggtaccgccatccagattacaatctttcagtataaccgtctgccggcctaccgtggctgtcggatcttcgttggtcacctgaatgtcaaaataaacgtcttttccggtcttctggaaatcataaagaaggttccggaagatactcgtattaaagtggaaggttgctgaaccgcttccttttaaccctactgtcttattgcctttcatcgctcttcccagaatcgggacttcggttttcgtcttttcgattttggcctccagattgatggcctgcataaagttgtaacgatttccttcaattgtcacaaaacactccgctttggatgcactgacggcatcccaggcattcatagtctgcatatttactccttccttaattgaccactaccgtcatatataactggctcatacagtttatgggagtcaccggatttcgcacaacaacagcccgtttactgtcccctttttccactgtaatctggtccgcctgaaccgttacaatcgccctgatatttgccaatttctgattatatgtcacaatatcattccaaaggctgatacgccctgcgtcgtcgtttggaatactccccaggtacttggtattaaacattgatgcaatgtcatttccaatctgatccagaactctgatagtctggttgctggaaaattcctcgttcttttcagcaacgaccgatgtcagcgtattaatatccatcagaacacgtacctggtcccccaccttatggaacataaatttaccggttttgattccatccacaagctgggtctgtgtatatgacgtattaaccgtatactctccgttatacaccctgttttcattggtcttattcaccgcgcatgcggcctcggctcctgccgtccagtataccagtccctgctccagctcctttgccgtattttcaactgaaatgacaccttcatagtccgcatcatttttctggaaaacgaccgtctggaactttatgccagcctcttctcgtaatcgcttcgtaaaggcaatatacaaagacttcgtgttttcatccgttgccgggcagcacagaatatgtgcagtatatggttcaattgccgccagataggccgaatgatcggaacctgtcggaacatctccatttgttcctcctgtgaggggagttccggccgtcgccgcaagggtggcatcctttttataatcaacatagtcgtttcccacaagatcggctgccttactcaccgtctggcggtccacttcacttccatccaacagtgtcgttacatcgtacttctgctcatcctctacattgacggagattacaatccttaaatcattgcctcttaccccgctgtatttagcagacgcaaaatcattagacgccttggctccactgttcaaacggtagaagatacctttcgttgcattggcaaacagttcccgcagattgagcatctgaggtgcgtcataggagtagccgaataacttctgcccgttcgtctgaaactctccgttcgttacttcaaatatcgttttttccggccccaatcaagaatcaagggaactgccacgatgcctctctctgacaaaactgcattagcacgggccgcgcttacaaaattgatataagcacccggcaacaccttattctgagatgtataacttccaccacctaacatttatttcacctttcctttcttatatttttctattgtttcatccacttcctgaaagctgtataatacatcatctgataagagagccattacaagatcccggctctctttatatcgtttggctcccataagctgacgtttcgtatgccggattgtttccggttcctgagccgccttttttaatgttttaccgctcatccaacctctcctttcatcttcaatgactccatcgtttcttccgtaggcttttcttttaagagaaaaccgttataattcacaaaaaaatggagagtgccttctaccttcttgcagctcttctgtgtcccgcggtaccgccgtccgccgtcagctgtgatctcctccatcccatccattaggatatccgcaacccgattcatatcccggttcgcatccgggatatcaccggaaaggtactggatataaacgcctgtgtcccggaaatagcgcccccctatcataggtcgttctgacggctccataaatcccacaaaaaagcagggttccttcaggccctgttctactggatccgtatagatggcatagtcatcaccaaacagctcattgagccgccgggtgactccgtacataatctcattaagcatgtaacaccccgataaccactgctgcagttttctctccaggatggctggtgtgatttcctgtagttcttgctccgaaatagtcatcataaactgacccggcacccatccgcggtgatttacggtccggtggccgtactccacataagacgcatattcggtggggttaataatctccaccgtatagtttccgctctctttctttattttacctatggtccatccacgccgcagggtaccgccagtttgaccggatccgctgggatactgacccaccggcgtcctttgtttaacctttctcagtagcctggccgccaattctttcgcgcaaagtttgcagaattcatcccggctctgttgaagcagctcaattttccgctgtagctcttttacttctttgaaattaaagctcccttcactccccattatgcatatccctcccataattccagcaagatttcctggtgagaaaaatataccgccggtttaccactgcgccgatagctcccgctccgcccctgctgtgtaatctccagcctgctacccgggcttatttcccactccggtgccgtgaaaagtttgattgtctgcgggacgctggcggcggtctcactgcccaccgccgggccggtcccagagaaagacaaatgacaaggaatatccgtttccaggcaaacctcttccatcttggtcacttgggttttcggatccttcaccggttgctgctcgtaaagtctgcatgtggcatcataagtctgttcaatcagctctctgtggacctgcctcccctgtgcaatcacctctgataacatattgtcaccccggctttctgtagctgtttaactgggctttgtaattcttgagcacggtaccgactatttccgcacctttgcttgcaaaagaggtagaggtatcgccttccgagatggaggataccaccataggcgattcagatcgcccgattccctccgcccggtaaatgtctaccgccatccggtaacaggtattcttcaggccgtcgggtacctttgggagatgacaataattttttatagtctcctccacatccgcaattacaaacataagcccggtatcctgagagatatcctccgcaggaataccgagcagctcctttaaccgtttgagctccatagctgcctcccttatgagatggtagcaacaaatacctgatccgcatacgggaaggacggaagcgccgtagcaactgctttgatccattttgccaccgggtcaatggtactgtaatggcacacgatgatctttcccacatcggagacttccacgtctgcctttcttctcagctccagctcttctgcggttaccccgtagaaggtatcgcccatcttgccctctggcatcatgataaatgcatcctccggcaggaagcgcttggcggcatacttgcccttggcatcctggatccggtactttttgtcatagatagcaatctgcggcagcttctgctgtgccaggaacgcattcagttccgccacggtcaggagtttcgcactgttcacaccataaatagcggcacggatgcgttcatcccgcaggatagcactcaaattcttttttgaagtcaacgctcgaaccggggtaaatccggtgtcatccacgatcttttcaaccatctcctccatgtcttccagaatcttcggtgttccagaaagccaggtctttgcagccttgtgttctgccggcattccgtaatcgatggatgctttcacgccgttctcgttgatctggatcttgccagtggaaagtgcctccattctcatgcactccacgcgggtttttacagatgctaccagattatcgacgtcgcggaagatgttcttaatcatatcttcctcttccttgtcatttctcgggctctccagcgcaataatggttttctccggaatctttatctttttcttaatcagcgccatgtcctgggagaagacctctgcgccctctctggaaccgatctccgcctcagtatcaaatgcgtgtactttggccgataccggcaggttgctggcgccctttaccatatcgatctctaaagcttcctttttctcttccggaaacaggtattctcccatatacgcttcctgctcacgagttttggtatagtcaatcagttctcttggtgttaataattcttctactctcggcatcttttagccctccttaatctgtaactggccgtcaacaaaaaatttgataaacggcattttcgtaatcagctgctgcacggactccaccagatagttgccctgcaggcgctccgtatcaacggatccgtcaatcatcagtgctcccggctgcggcccgtgggtcacctccaccgtgtcaaacaggataccggccggatccgccgacagcgcataggtgtaggagccggcagaaccgcttctcgtcactttgaccgcgttcccgtccgcatccagcagcgtccctgccaccacatactttttaccgtgttcatcagccgccacccctgtgtctcccaccgtacaactgatgttctgataacgctcactttttaaaaattccggtgtgttctcaaacgtcttttttgttaaaaacatatttaacctctctttctttttagccccatgcttttgcaaaagggttatctgctgccacatttgtctggttcattgcctctgctattcctttggcgacccctccctcgttggttttaccagctcttggcttatagccgctgccagtacctgccgctcctgcactcccctctgttccggcattttctgccttgaacaggaatcccttctctgtcttcaatgccttcagctgctcatccagacccgcgacttttccgtcgtcagacagaatcagtttggtcttgtccagcagactggcgaccagctccgcatcgtgggcagtgctgccaacagcgagtttcactgcggtggagagcctcagctccttcatatccgcctcatacttctctttggtggtcttgttctcctcctgcaaatctgtaatctgcttctggagttcctcgctgctgccgctggcttttttaagttcctccaactgcttatctctggtcttgatatccttctccaactgctctttcgtggcattaagggtatccatgtccgccttggggacataccccaccagctctttctgtgattcctgttcagccttggccgccagctcctcactgataccgagggcgacaaattcttcttttttcattatttccctttccttccttattttttggtataaaaataacacgtcaggagaatcctgcgtgctattctacttcttctatggatatgatttctttcttcctgatggctgccctcattccttcattcgtaatgatttctataaaatcatcaggccctattatatcatcacaaagtatttttattgctgcatcaaaggtaaaataatttgttctataccctaacaactgagtattaatttcaattgtttttgtgtgttgttttatatggggcataatcccccttctgttgcgacgtcgcaatgaataaatgtccacctacagcgctattcgattacatctggaaattcttctccggtttctattgccttttttatatattttacgtaatcatcatatgaaatgatttgataccttacttcatcgtaccaatccggttcacatccgaatttgctatggtattcatcgtataatttcgataattcttctgtccatttacccgtccacattttcaaccagcctcctcagtttcatattaacacgctgggttcctgaagggaagagggtttctgccattttcaccacttccgggttattatcataataaattcggccatattgcgcccagatctcctgcatttgtataccatcatatttattccaatacttctttgaatgcccataccccagattcacttcgccattggacaatgcactaattatatctgaaacacctctatattctgcttttattttatacctccccgtatcagatagttcaaaagcttccggaaatttctgttttattgccaatgtaatatcttcaaattggtcgaaatccatgttgaaagccttaatcatactactccgtttcgtaacattatactgcatatcaatcttatggaaaagctcgtgtgctaccgttgacgcttcactttcctctgcaatgccgatagcgttaatgccctttatatactccgactttcggtcattcgaaagataaaaatctgtggttcccaattccctctgtaaaatcagcgctgtattcttatccgctttttttagcccggcatcgaactcttttgtgatatttgaaggcaattcattaaatggtacaatcttagaatcaacaaaggctccttttatctttttcttggctgaatttataatgctatccgattgcaaactaacatagtgtttcttccactcctgatacttcatatctgcaggcacgtaatatgtctttcccgtcgcttcattcctggctgcccgctgttcaccggctgtgaattcatcctcgaagtaaggaaccgtggttgatcggcaattgggatggaatggcggagctgtcacgccaaccgcatattccttcatgtcaaaaactttcccatccagataccggcagatttccgacgtgtggctgtccagtgtcgccagaatctcgtaccgctccacccccagttccttcaggcagtctttctgggccgcggaagagacagccgccgattccgtcataatcagacgccccgcctggttccgactaacctccatcgttttagtaatattgtctatggccttctggggtgacgcgccccggatgatgttctgtgtcagctctgtgtgcagcgtattcaccagtttctgcttattcgcccatatccggtcggagaagttcgcaccatcctgcgcccagggttttcggagcatagcatcaatttttcttgtgtccagctttgccaggttgctccccacgccggttcctttcgcaatttcataagccgtgtgataatactgctgcccataggccttatgcagatagtccgtcatcccaccctcaaactctgttgacaacagttcggcgtgctgctgggcctgcagcttcatagcctccagataggaaatgtggtggcgggcagaagcattctccagctctttcatccagcgccggtctatcgcattttcttccccggcctttatatactgctccacagtccagtgaaattcttccagctctcctttcttcagcagtttcttggcgcctgcatagcttatatcgttattgtcagccaggcgctgataccaatgctcaatatccatttgcatatcattggaggccagacggaattgtttctgcacatccttataataggcggcactgcgccggtattggtcatcctccaaggctgccatccgcttggcccagtagtctttatttgacgtgagttccacctcctctcattgcatttcattttcctccgctctataatatacttacaggcatttccggcctagtacaaaagaaaggagtgatatctatgtctggtataaaaataaccggcctggacaaattggagaaactgggaagaaatgctcggcgaagcgacagagcaatacgccctcaagaaattaggtctctagtcttccggtttagaggaaagcgagcaaataatttgtttggcttcggttaaaagagcaacaagtttgctcgctttctctaatgcggtttcaggagattctttttctaattcgattctaatctgtttttccatcttctccctccttctcctcttggttccctgtctgagcgaacgcctgctgatataggtcagcctcctcggcagccttctgcttctccttttcgatctgcttttcctcttcatccgcgttttcaacaagcggatgatttttaaggatcgtcttgttggatatcacgccgacgctctttacacagatatccgtcagctccgaatcgctccgaatcgcagtcctggtccaggtctgcgtaatttgaccgcactccacgccaagatactgacaaatggcgcgtattagttccccgaaacccaccttaaactccgtctccatcaggcctgctttcagttccagaagggagtatagatatttaagtgcctccccagatgcatttccaaacttttgcggatccggatccactccctgcccctgctcaaaaatcgcctttctcgtcatttccagaaacttctccctagcctcaatcggaatactgatggtcaacgtctccacacctgatttcccgtcctccgcgccagagtccaccttaatcatcttgtatttcttcaggtcgtcgataaactcttttttatcggcgccgccatagttggtcaggataaagataacctcctgaatatcctccaaatcatttaaaaaaccgctgaacaccttatcataggcatccaccagcggtttaatattgaccaggtcattggaccgtatgttgttattgtaaaatgggataaacggaatccgcccccatccatgagtaaaaacattgctcttgtccgcagccccctcatccggcacaccaggaaagacagaatacgtttccaggccggttgtggctactgtgctgcttttccgcgaatacgaatagcaccgctcccggtcccagtattcccagaccgtaatttcctttcctgttgcgaagtcgatgtccttataggtccgtagtaccgcaattagggcctgatccaaatcgctacaataaatcggtatgatctgcccggaatcgacgacggcatagcaaaactttccatcatcgtccttccagtaatgcagccaggcgctctcgtggttggacgcattcacacagagatctttacagatttttgggaaagcatctcccagcaaatccgcgattttcttgttcgcactctcatttccgatatcaaacagtggcggtgctgtgaacatatatgacgctttctggttgaccagtagaccgtggaagttacgcgggatccggttatctgcatttctcatcggtcccgtctcctgccctttaatgccaaatcgtagaatatcattctggtttttgtaataccggtctgcctcggtgcatctccttatatgtctccggtgccaagaggcccgggtcttaattaggtccttgaccgcctcaatgtttgctttttcatcattcaatttcatcacctgccttacttaaaaatcgatattccagagcgcttcctgataacagtcatgcagaaataacgcagcgcatccagcgcatggtcgtgttcctttactggtttatcctctccgcgctccccggctttcgcatcccagatgtaggaagcaaactccttaatcaggttggcgcaggaggagtcaataaaaatggaaccctgaagcagcagcgtggccacaaaccggattccgtctaagacatcattttttgccttttttactttatagccgtccttctccagctgggccttgaagctggctgccgccggatccaaaatgaccgacttgattgtggcgccatcgagccagtctgtcaggtcgtctgaaaattccttgtctgtcttttgccggcccttatctcgaccagaatagtaatactcccgacggcaataccatttcttgtcggcgcccttattccacagtaagaaggccgtggggttctgggtgccataatcacaactgacataccgctcgtccgtccagaaattccatcccgtctttgctttataggcagctgccagggcttccgtgtccaccgcgttttttaccgggtcgaacatgtcatagatgatgccttccgccatcgcccataatcccaatatataacgtttaaaaaagacaccggtatacatgctccggtatctctctttgatgcgctccgacaagcttaaattatcctccatcgtaaaatgcaggccaagaagattcttctccttggccttatccagccaattaagcttaaaccagtggtacggcccgtccggattgcagttaaaccagtattttgacccatccacagaacatcggccggttgcctggttgacgaaggattccggcatcagggcaacctcatcgaaaaaaacgccggtcagcgtgattccctgaatcaggtcctggctgcgttcatccttgccgccgaagatgtagaagtaattggtagtcggtccccggctgatttctaccatattgtcagctcgatggtcctgcacgtggtatccacggctccgaagcatcaacttcagccaaaacaggacattccgccgaaagctgccgatggtcttaccgcacattgcgaagttctggccgttgaatgtactcatggcccagaatacgaatgacagcgacatgcagacggtcttcccggaacggatggctccgtcggcaatgataccgtcatagtcctttaccgggctgttgggcagccaccacgtaagcacctgcttctgtttccgggagaaaggccggaacttaaatacctgtacctttgacaggatattccgattccccttcatcaggttcagcttttctttcagtccttcaatacgctctctaactgtcatccacatctccccacagttcaccggcctctgcgttcaacgcacccaggaatccatcatcctccagctccgtctcctggccgccaagtttcagtgcggccagttccgtcttcatcagttcgatttccagacgtgcatcgtcaaagccaaatttatgcagggactcaatagcccgttgctttcgcccctgaacacgggtcaacgcatcttcaatggactggatctgccccaggactgcctgatcctcttttaaatctatccatttatctttttctgttccctttttctttttaactgtcgtgaaatcgcaatcccgcaagtcttcaattcgtttcagcatccggcgctcccggactgtcaggagctggatctcctggagaagaagctgctccttatccggttgaatcatgccgatgagctgtctctcatctggctccagcgtatcaaaaaagagagtctcaaactctcctgttgtgactgcattcttgttctgttccggtgctccgccgccccggttcccgatggcattcttgttgcctggctggccgcctttacgtttcgcaacgttgcgttttggcttttgcaacgttgcatttgcgttgctttcccagccatatctattcttccagctcctgaccgtcccttccggaactcccagggcttcggaaatctcgattagttttttgcccgacaagaacagttcttttgcctgctctgctctggcatctggcgctcttgccaagcctcaccacctctcaatcgtgtttgtttttgggtatagaaaaagagacagccgaagctatctcttgtcattattttttttcattcatattttactggcttttctgctttttatgttcctcctcctttatttcattccaatactgtatatactttatctttgcattcaaattgtcaaccctatttctaataatcacaatcgaacaaatcactatgcaaaaaacggctaaaataattttcactatattaatgacacataactctccaatagtctgaataatacatatgattggcccacaaaaactcattaacaaatatgggtttgcccctagtttttttgaataatgcttctcatcatattttaagagcctagtttcccacataggttcttcattttcataaaaaacttttatgtacatccccacttttaaaacacttaaactttggttaatccctagaaaaaataaaggtaaaattactagcgtaggtattaaaaataatagcggttctgatttagagaacgaatatgttattattgctactgtaacagtatacattatagcctcataacctttctctagatttgtagccgtgataatttcttcccgtaatgatctatattcgtcaatagtctccatttatccaccccctttttttaaatcgaatttattcctcctaccattataattatattgaggatattgaacgatttgaactttgcagagatgggacgaccgaacaggtggcctcatctctttttgctcattcggcagtctccttatttcagtaattcacttattttgttgtcaaatttatacttatcaagcaaatgcatatttttctttgatatgttaactccatactctggctcacttgtctggcctggtttgtcatatttatgatattttaataggtcattttcttgattccaatcaaaagctggtattaaatataaatccggaagctgaccttgttcaaaaatcagcaagcatagatataaactcttgtctgctatgtcaaaatgtctttccttcataaaaacatagcccgtatctgcctgtagtgattttacttggattgcataataccgactattcacttttacaacaaagtctattccatgatcatcaacttcagaggtaaacacatccaaaccgtaagaagcaaattccattttagcataatactctccgtatgccccaaacttctgcttactctccttggataataacccccaatccatctttggcatagccctgctcctccatccattttcttctatcatacaccaaaattttacaaaagaaaagagccacgggtgggtggctctgcgtacgtatattcatctataaaacattatttctgattaaagtgttcattaaataacttttccaattcctctctttcaagcatgttctctgtaatttgttctttgataatattcatataatcggctaggtcagcttggttcatttttttcagacatacgttttctaaagccgttaaacgataggaattatatacgaccttaagattttctttttcttttacagagattacttcggaactatttacaataaaaaaaatctccagactatttccaattaattttactgcataaaatagtataaaaataatcaaataagaaaaaacgatagacaataataaaactatctttactgaatactctttattactcatactcagtatataaaggcacatcaatcccactattactacagacgtaacaattcccagcagataaaaacttaataatattttttctaaattttgtaacttgttagatttaacgatcttttcaacctcttttttagaaattacgcctgtcaaaatagctaagcctgcgactgtaaaacctaaaaagcctataagtgctactgcaatatctttcgtgaggctttgaaaaagtaaatttatttgattaagcgaattatcttctaacgtgccctttagtaagaatgaaataagaatcgaccctattatagatactcttacttctaatgaatttatatcgattaaatctttatacttcccatactttccaaatttttttagtgctgaatccttcattatttattgtccttcattgaatggaaacctctataaactttgccaaaaaattctagtataaagtttttggcttcttcattatactcatattctcctaaattttcatcaacaattcttgtataggcagcatcttgattactactaattatttgctttcttccattctgattaattccatatgtagtaacatccccatatcctcttgagactgctttaaaaatatcttgcatgtatttagattctattttcaacgaactattaatatcacttgttgacatctctaactttaacttattggcatttgtatcctggcaatctcggatatattgtaacccttttttaaattcttctaagtcttcatcattagagttcggtggaattaaagttgcccgaatactacgaatagttttcaattttctaattttttcttgcagaacatctgtatccttctgtaaaaaaatctcaaatttatatcccatactattttgatttaaaatgaaattgaatgccgtcataaactgattatacccaaatgattggcgttcggagaatgcaattaattcattattacaatctaaataaaagtaaatacttacgttctcttcattaaaagattgatatacttttccgttctcgtctattttctccgttggcttattaaatgttcttatcatctttcctgtaacaattccatactccattttattcaattctttgaatctatatgtagaatgttgatatgttttcactaaatttcctaatgcgtctctatacttactattagaagttgtatcatgcctcttttcttcacccaattcagagtatatagtttttttgacatcttccaaactcagtttattttcatatacatcaaatatcccagatgttaagtttattttagctaaatacattattgacattttaaaaattcccctttgacatttttttacattataccacatcccatctggaaattctttccatattatcgtcgtctgttttgtacaatcagcacagaacatatattctgtttagtcgaatgccaaaaaggaatagaaaaggcacccagccataagccaagtgcctaaaccgtatctggaaaatatcttggggagaaaaaccagatacaagcagaacatccggaatcgaaccggaacccagggcgctaccctgtccacctgccattggtgggatgctccacatgtgccggtttcccggcatagccctgtattgtttttggtaaggtcaattaagggtaactttttgaccgctccgcattgacatcagcagcccctcgcaactccgtccagggacgtctcccatgttccttcgctcggccactgtttccagcttgcgcttcaccgtactttagtcagccttgctatatacttatcactgcctgcctcgccggctggcagcggagaggatttcttttgccggttctccctgcggcgggttcaccttacattcgcattttacatatgtgccggccactcgcgtgccctgcggcattgcccgttaatagagcctggcttatgagggattacgcgataccggcgagtcgaccaccaggctgttacacactggtagccgttatccgatggaggagagccgctggctttaaggcctttggcttcatagtacactatagcatttagaaaacggaaaaacaggaaaaaacggaaatttttacgatactttcatgaaattctcaaattccttccgtattccatctggtgttgccttcctccccatccgaactgcaacttgtgcccaagtcatttcttcaaaaatcttcatccggattatccgctgcagccgctgtggaatcgtattcaaccacgcctcgacctgtaccttaatctccgctgcggctgcccttcgttcctccagcagttcctcctcgtcatccagcaggctcggtgtctgcaccgtcgcatatgccagcccctctatgtggtaactctgagccgcatacgggaactcatgcatggagcctttgacggaatcttgaagaattaccttgcgccgttgcctcaacttttgaatctctcgctctgtctccttgattaactcacaggcatctatgtactgactaagaatctccttttccaacggcatcacctcccttcagtggccgctcccgcagccccggcaccggacatagctccgtgtaacaatacgccggcatcaccgccgaccaggtctccggccgcggccccttcaggatgtagtcctggacggatgcccgacggcgccgctgctctgccacttttatgtaatctgtctttcccgttttgattcctccttatcgctttgtcatataagtcccttcctcttatcagcagaatatataaaaagaactactaacctcatattcgatagttagtagttcttggtaattggtatgataggcggttaatgcgtgtagtccaaaaatttaacgctatctcctaagtctttcgcaatcaaatccttcatcttcttggcgaatggacatggatatccaataggcgttcctttttgaatacaactcgcaaatacgattgtgtctgcaccacgttttactaaatctctggctctaagcacggctttctttgccgggcatcccccgcaatttacaaagcctataatgtcaatatcttctgtaataccttcaaaagcccctcttctatctctaatcatctgaaaatctgttgttccagggcaatagtcttctgtttgttggcaacgtattattcctactttcataggtcatccctcctgcaatattttttactacaggatacattattaaatactaacaatcaatatgaaattgtcaatgttcacacactcaatcgcaaaatgtcaatttagcgtttcattgcagaattatatatatctattacccactgtgacaattgttctgggttacgtgttgaaatgcaagccaacatatatgtcgcatcatcacatctattccaatctgggcattgaccatcttctttgtatggatacggttcacaagtttcatccatgatacagcaatcgtattttactaatgctagtatccctggggttggactatgtaacgttttgacttcttctatgatttctgctgcattcagcattcaatgcctcctctaaatgtcaatctgggcgataatgagaatatcgctcatggcacatgttcacaattacctgttgaagttctcttatatcacttttcaattttctgttttcatcttccagcatacagtttttcttgttcaaaacctcaaactgctctaacgttaatggcgctacttccatcttatttacacaatctccattcatggtaattttgttcctccttaaaatgtcaattttgttcagcagtgtcacctgcaaaagcatcccttatacgccgcgccagttctgcgcacatgccgtctacagtatcgtcgctctcccggatgtcttggctctgcacgtctaactccttcgcaatttcataaatcacgtcaagtacaccatctcgatatgtgccagcattcgattcgcagttaatgcaagtaaatatatcctcagcaatgtccaatccttttcttattccttcgtgatatttttgcgccgatttaatttctaagatttctacctgctgctgatatcttctactctcattgatataatcaagtgctttgtctgtgtctacattctttgctttatacattttcttcctcctctaaatcttcattttgtggattaaatggctttggcaatggcatccaggctgcaatatcctctcgcgtgatacctgcatctgctggcgttatatgccacctttgaccattaggaccataccaagctaccaaaatccacccaaatttcgtgcaaactaaaacatcttctttcgctttcggcaactgctcttccaccgggatccatctaaacaactctattacttcatccagcaaccatatcgagcgtagtaattcatcatgtgtcatagctgctctttcttctctcgtcggtttaggtgttctcaatgtcattctatccctcctctaaatcctcagttttcaaacactcccatgttctctgtttccagttatatttccagtttacatcatcaaaaagatgatactttttacattttacacaccattgcacctttctcatctggcaccttccttccgaaaatcttcatatacttccttgtcaattttgattggttgttttaaagatgcttttcaatatgcaaataatcagccaaattccagtggcaatagaccatttgaatgtccaaccgaaacacatggtgattaatttaatgattccacatgtaacgaccagctcaggccatagcaggcaatcagcacaacaataaccatagctgcaaccagcccaccttctttaatcttgttttttgtttttctattcattttttcctcctaaaatcttaatattgcggttcaagaagtctttgtatttctctgatatgccgtcgaatgtcccctgttttttcaggccctaagtcaacgcacatatcttccacagcttcttgaaggttcgcagccatacctgctaattcactttggtggtaatactttttcaatgtaacgctatctgctgagacaaacatctccataggtgttccttcacctattcctaactttcgccttatttcctttggcaaaactattcgccccaaatcatctactctccgtataattcctgtattcatttcctggttcctcctctaaatcttcaatgtaaccattacggtgtattcaccgctttgtcaaccttgcggatcatacggcatcggaatccaacgtggttgccacgccttaatgatcttatacagcgagcagccttgattgtttacaaaatctccgtcacgatagtatgccgtccgaacctcttttacttcgttatggcattctaccgatgcgtatatagccatattctgagccggaagccgctcttccaccggaatccatcctgtcagcattctgccgtccatgatctcttccggcgtcagtccggtgtcttcatagctacagcagcgttcaagcactgctgctctgttggcttcccatccctccggttctcttgttggatgtaggtataccgcggttccgttctcgcttctttctgttaatctttccatgctctctcctctaaattttcagttaccgtcccatagcgactttagcaattgttccaataatctgaatcaacaattcttcctgctccacatcaccagtcagcaaactacatctaccagccatatcagaaaattccgctattaatttgtttacgtcaacttcttctctcatgaataactgtcctttcctcggttcctcaaaatcctcattatcagattcaccaaacggacattcacttttcgcattgtctccgggacaggtataacatttgttgcaaatttcgcattcatcctgcttccggcaatctgggcaaatgcatacgctacattcgctaatcattccgcacctcctttaaatcttcattgcttccggcagatattctggaaaatcaaaaatagacatctgtccctctatattttccgtttcctgcatcttctgttttttatatttgttatagcgcattctgtactcataacttttcccaaaaatgttccaggccgcctttaccacgttcggttcgtatggacggattttttccaagtcttcgacggctctgtaggaaatagggcatccgcagcatccggttctcgcaaggccatatacctcatatgcgtcagaaaacttgattccatagaaatttttataccattccttatctgcatccgtaacgtaatataatggccggagcctgtactgaccgctgctggtttcggtaaagcacatggatgagctgtccttacgaggtacggatcgcatacctccttctgccctccgctcgcccgtgatgatcatgtcgaaatatttttgcgccctatgggccacctgctttttgcaataatcgcagcaccttgcgctgatctgaaaatccggagggtactccccgataaagtcccgcatgtattttgacgaattaatcacaagctggatgtccggcctcggttccccggcggaattacagcagcatagaaaattaattacgctttcgcagtttggatatcgctctttcaactctttccgctttgcagctttatcctctgctttttcgtactcttccgcaatcgacaagggaactccttttttctgccattcctccagaccagaagacataatctttgaaacaaatggtattccgtattttctggatgcctggacgatattgaccttgggtctgtattccttgatttcgatcccgtaattttcagcagtttttttcacgtggtcttttgttgctttcatttctaaccctgtgttaaaaaatgcatattcgatcggcggcagattaaaaagttctcgtgtgcgctcgatgagatgcagcatgatgtcgctgtccgcgcctccggagtaagagcatattgcttttggatgctcttttatccgctttgcgataattgcctgtatagctgtgaatttggctggtgcttcaaagtccgcatatggtggacggtctgtatataccctgcttttataagtttctttcattgtttggaggagccgggatccctttgcgcgcgccgctccggcctcctttctgctttacttaaattcgttctttcgctttgctccatccctgcaactctggcaacgcctcctgtttcgcatgatcacctctgttcctcggcacccacttcgtcctccggcacaatcggcatatctcttcccaattttttcagcgctcccaatatcctctgacggatcgcatcccagtcatagaccgccaatagctccgccttacttattcttctttccacgttccatttcctccaggatcgtcccgcaggcatcgtcccaaccgcgggcgtaatcatccgccccgtcgcatcccgatatactggcgatgatctctcgcactctctggtaatccccccgtactgcatccctggcacccgcagcgcccgcggcgctccctgcatagcatccgtcttcaactctccgtcggccagcatctgtgtcacgtatccgttgataacagacttgcaccggcccacggcctgtcctatctcttgcatcgtcggaggatagccatgcaaagtgatgtaatcaataactgcctgcttaatctggttacgtatctccattgttcatcatctcccataccatcttgtcatagtcatagccgtgttcttccaggttgtgaaagcggttctttgacttttccatcacttccgcccgcttcggcctccgtgcctgtagaatcagcgtttcaaacttttcccgcagctttttagtgctgcggatattggtctgccaaaacggatcctggatggcaaattgcaatgcctcctgtatatccgcttcgctcctgccgtcaagccgcttcatccgctccacgtggacacaccactcgctcttttccgtcgctgtcgttgggacctttgcacccgggaattgacgcagacaagactgcaccagggaattgacgcattgcatctcaaacgattcttcggtaaacgatgttggcccggcctttcgacgcggagtgtcaacgacgtcttttatttctttccttcttttcttctttccttcttctattgttgccgattctgtgccggttgactgccgattctctgccggttgactgccggttgactggtataaatggtagttttttattgtaaatacagtaaattttgggtgtcggttgactgccacctctccggtactttttaaatgttccagtgccgtcctgacattttttattgacaatccggtttcctgggacagtccctggtaagacgatgcaaaagagccgcgcggtatctccactccctgaaaccgcccatccttccaattcgcttttagaagcatgtgaaggaacagaatctttgtgttaatatcggaataccattcccactccaaaatttttcggcttaactttataaaatcgctcataggctcctacccacgccaaacatattgagctgcccaagtgtttcgttctgccgctgcctccggtactgacctgcaaatttggctgctccggcttgtgatgccttgatactatgcatccggtcgttttggcgtttcagccactgcctggcctcatctcggccagcctcgctggtttctggcagataatagccctttccatcatccttagaaaggattgcataattacgtcgcaatgcttcgattgctctccttaagctgcggtctccacagtggagcttctggcacagctcccggcgtgtctgagcgttctggtgtcctactccgagggcgttataaaccgaataggtaaataattcaaaatcgttcactccctcacctcctcgttaggagtgggcggccagtcagggaccgcccgtgcacttaagtggcatacgtgatatattaaccaaaagtgcaagaatgttaatggttgctatgtaatgccttacggcagaacatccaattcctcgatctcaacctcaatccgtggaacttccgcataaaaaaattcatgtgtcgtgttcttcacgaattgaggggaatcattctgtatcacaccgcatcgaatcagactgtcctcaatcactttatccgcgaaagaaaacacgttcatcacgtctcttttctggccttttaaaggctcatagaaacgataatgcagaatcacaggcttcttggtctgaaaccgctttaagcctaaccgaatggcgttgcaggcaatcatggaatactctttcttcattcgtccgcctgctctcgggtttgtcccaagctgatggatataatcattcagggatgggaaggtcttgtctccataataggatcccttgattacaaatttcataagtagctttctccataccgtttccggaattcttctctggtcccaatctgtgcctcatagacagcttgtcccaacatcttcgacagcttttcagccatcggattcccgtgtatttttaggatgttctcattcatccggtggcatccctgacagatgggagctttcagcccatcctcctctgccagttcccggcgccccttcccgaatatcaaatggtgctcttccgtcgtcggcctgccgcaaaacatgcagattgctgtatattttgtaacaattgactggctcatcttacacctccgtcaaaagttgcgtgtaatgtattggtgcgtgaaggaccttcgtgtgtttacagtaatcacaccgctcacatcggatcggttcaatctctccagacttcaacgccagaattttaggcacattctgctccacctcatacagtttttctttcaggtgggcatcatcgatctggatcacttcaatgtcagtctccttttccttgctggccgccgcgatgtaaaacggcaggatttttccagtgttttgacggacaatttcctgatagactgcccctgcaggtcatatccccaatactggatgaaatccatatagccggtatcccggacccagaatgtctcacgaatagacttcattactttcaaatccacgatgcagcagtccggcagatagctgtcaattttgattttccacttggacccaaacagttccccggtcatgatcacctgcttcatgccggacatgtatttcataaaatattcatcccgctcgattcgactgatgatctcttccgcttttcggtactccgcttttaaagctccctgctttgtaaaaatctcaggattttgcgcctggaacagatttaaggttccttcgaaatgtgcatctacataagacccaaccaaaagagaggctgttttttcctgctcccactctccgttcagctttgcaagtgcttccgcttcacaagggattttccccagactgccgcagaatgatttatactggctgaccgataaatactccctatctgcctctggactgaaataattctctgctgtcaatatcatttaaatggtccctcctctccttccggcggataaaacgggtctactgcggcaggtcgatcggatggttgtatatctaaaatctcccctctacccgacatcccatcaggctgtttggaatatacaccctggcgaagaatgcactggcccgataggccagcatcagttccggcatagtctgccatttagaggtttcgttcccatatttatctttcttggaaaaccatccttcggccttcgcaatgccgattgtcacttctggaccgttgacgatctcgccagtctctctgcgtactgcctgtatgtagcatccccagctattggttcccttttcacctgtataaaccggccgcacattttgatactctggatttgcccttatcagagacatacaagcttgtccgctccaggacggtttcccttttaccacgtacaagttttgcatgacaaacatcggacttacctgcatccggtttgccatatcaattgcgatcatgcagtcctctggcttattctggtagaccgccggaataatactggtttttgaaaatgcctcagcaactttcatcagtacattaaaattcaattctgagccaaagggattcgatagcacagtggtctcttccatgttcatgatttcctccataacgttcctcctataattccacaaccgtcagctccggatcatccgtggttctggttgcgataaactgtagtcctttctcttggcactttcggtacaattctttcctcatggccgtggacagtttctcgactccatcaatcaggataatctgcagaccattcggcttctggatagccacatcaatacacaaatccaacttttcgccatcggacagattgctgatcggcaaaccatgaatcagagggattccgttttctaccgtcagcccctggatcggtattgttgccttctccagaatctctcccggtagtcttctggccttttcaatcttttctgtcaggctccgagactccccgagcatctgctccacttcgttctgcagcgcttccatacgatggtactcattcaggtgtcccttcatttcttctgcataggaggctctttcctctaattccagcgtgtttcgcagagacattccggcgtattcctcgtactctgccacctctgcatcataacgggccacattcgccttataggtttgttctgccagggcaatcttgtcctgctttttatctcccagcccagacagctccttttttaaagaccgtatctgttcttccaatccggcaatctgttcttttaagccagtttccttccggctatattcccggtcaatggatgccaattcaatctcccggtccgcctggaacttccgcaccttattatctcggttctccagcagccgcttcgctttttcgattgtatcgttcgatttccggatgcgctcaatttcccggtacagttccccgacgttctcactttcccaccgttctgcttcatatcctgctgggatcgtatcggcgatatcttcaataaacgctctcttattccggatatcccggttaatatcctgccgttcgcgaaaatatgctccgctttccgactggatatcattcaaaacggagagaatgttctggtcgtaagatacccaacttggaatttctccgaaccactcccggatggtattcatgtcccaggcatactcaatcatgtccagaataatcgcgttctgctctttttcggacttctccataaattcaaccggtgaaagctgcagaggagaaaagatatcccgcaggaaggtctctggacttcccacctcgtggccgtcctttttcacgctcttgtaatccgcctgcgctgtcctgggctttcggtcaatccgtatgccattgtccgtctcaatcaggatttcaccttcctcggctccttttttgatgatatatcggcggtctgacttattcgtcagggcataccggatggcatcaattacagatgtcttgccggttccgttctttccggaaagctcaactgacgttccgtctgcttcatattctgtgattccatataagttacggatcttaatttttttgattttcattgatttcctcctgaagatcccttatactaagggcattagataatttacttatttacctgagcctgtccggttgccgccggcaggttctttttctttctcggcatcagtttccccgtatagcggcttactccgatggcggccccagctctatttgtcccgtttcttcgtctactcattttggcctccctactggtttttaaaagtaaccgtcatccctgggtattgctccgtcagcatcttttttgcatcactgaccatcacattcgctgccaatgcccactgcacaacatcacaatgctttttaccatccaagtaacaccatatggttgttttctttctcttcatcttttcttcctccttacatccatccggccgcccgcaggaacaccccggccgcaataatccatccgtatgtcatccacaccatcatgcctgttatccgctctacctgcttgtttgcttctgcctctcgtgcctgcttgacagcctcgggccatcgttataatgtttgtgcattggtatcacctcccctcaatggacgtccagccagctgctcgaacagccagagatcatctaatcgataccttcccggatgcgccttacggtttcgcaaagtgcttaagggcattcctattctttttgcaaggccttcatctgttagattatttcttacttttgcttcgtgaatcaaaagtttcacttcatcttcatgacgctgataagcactttttttcattctctcacgctcctttcttgtctggtaatcttttccttgctgtggtacaatttccttatcaaatgcaagggaggtctttcatggaaatattatctcaatactcaacctatatcgtttgtattcttactgctatgcttggctatggtgccgggcgatggcatcagctttttctcgaaaaacgaaatattatagccatacgttttcataagctgtacgcccctttcgtaaaagaatacctgaaggctgggcctggagcattttgctttacagacttatccgatgaaaaacaaaaaatatttcaaaatatgcttttagataactatgaatacaccgattccgctttaaaaacgttgatatatgagtttcgatgcgccctttcctgtagtgataccgatgatgtcaatcgtatattttttgaaattgcaacctcgataaataaaacttttgataaaaccagcaaaaagctatttctggatcccacaaattttaaacacgctttcggcggaatccaaagaatctgccctgggtaaagaatcgtgctgaaatctaatccatttatttcagctatggttttatatccttcttttgttccatattcgcaaagggagatacttataagggtgtctcctttctttacctcatactttttacttacaagcttttcttctataaccaataatcttttctccagtgcctcccacttctttctcggcatcaacatcttctctcacgctcctttcgctttttccatagacacattgccttttccttacctatctcctataatctaagtacaggctcctgccagagccgagtataggaaaaaggagaaatattcacactatggatatatcaaaatcatttgtgagtcattagacgaatccatgaaagaagtcgctgatggaaaattcaaaaactattgcaatgttgacgacgaagaagtttctgaatctgggaagcaaaatgccatgctaatgaattattcagctattcttttaaggaactatcacaatgaactcaaacggatattggctaatcagggtattgatatttagtttttaataaagacgctgctaaaataaatgccttatccatcttacttaaagactgctttctgccagaggcagtctttttctttttgttttcttccacctctctcacgctcctctcttgtcttttttgtcacctcattctataatgtacttacaggtgttacagcgctaagtataaaataaagaggtatcgtttatgtcttcattaaaatcttttttgcatcctaccaatgagccaacttctgagcctcagtattcagaggatttgcacaacgccatcatggaatcatgtctcgatgattctattaaggtaatccgttatctcgaagagcaaagccaaaaacaaaaaggctacaacaccgcagtgctaatattcactttcattagtgctataggtggaatcattgccgctgtaacagggatccttggtttgctcaaatagagctcttaactcacgcagttctctcaaaatttgtaccatgaacattgtgctgacatctttcttcttatctgcataatgttcaatttgctttaacccctcatccgttaaattcatctctcacgctcctttctcatctgtgctaccctcagaaaaaagataatccactgtacactgaggaaaaacttttttcttaattgcatacatttcgtttcttttaaattcggtggttccgttcgctttgttttttaacgtttcatagttaattgctgtcatttcggacaatgctttcagagttaactttcgtcttgccaactcagcatttaaattgggaaacattctatcacctccgtttgttaccctacatcgtaatatattcgcattatatacccacatcgtaatatgtcaaccctaaagtgttgcttttttatttcacagggtatttttttactttacaaagtaatagaaatgttgtatattcattttataaggaggttagttatatgacgtttacagaaaaattagatatgctaatggaaaagaatcacatgaataagtcggagctgtctcgtatatcaggaattccatatacgactattgatggattttacaaaaagggttcagacaatataaagttatctacattaaaaaaattagcaaagagttttaactgcagtttggactacttagtcgatgatgacgttgttgataacgagcctcaaactattgccgcgcacaagaacacaaattggacacaggaagaattaaataaaataaacgactttaaaaaattgttattagctgccagatcaaataaagggagtgattgattttgacttatgaggaacttcaaattgaaaatgaaaatttgaatatacaagagttagatctttcggaagtatctgagcttaagggattatacatagatggaaatattgctattcacaattctttgagcgaaaccgaaaaagcttgcgtccttgctgaagaacttgggcatcattatacaagcagcggaaatatacttaatttaaatatagcaaataatcgtaagcaagaatatgttgctcgactttgggcctataaaaaacaagtcggaatttcaaatattatcaaagcctatgaatacggttgcaatactttaaatgatactgcagaattttaaatgtcacggtggcccggctgctgcctatggccgaggacattgccggtgtgatctcacccagcaatgaatcggcaatgacaattcccaggggcccgataattaaatcggcatcgcggcaggccgtgataacaggattttctcctgtggcgcccagatcagctcccgccttcagcatagcagaagtggcgatactgttggtgccgatggctgtgagaggcagatccgggtatgtattcttaagctgttctaccacagtttttcccatccggccgccctggccgtcaattactacgatttttttcataaaaattgacgaatcctttctgctttttaaaataataccccagtatatttttactagcatatcataaaaaatgtaaaaaggaaagagaaaaacgcattttttcggtttacaaggcagaacttttctattataatcttgataatgccttactgggtcttttggcaaaaaggacttctgagcggcttttagaaaatgtaaactgcagacaatgagagggaaaaaacatgaggagaaacgacattcacaaagtgatgattatcggttccggtccaattattatcggacaggcatgcgagttcgattattccggaactcaggcatgtaaggcgttaaaaaaccttggttacgagattgtactggtaaactctaatccggcgacgattatgacggatccggagacagcagatgtaacatacatcgaaccgcttaatgttgagagactgacacagatcattgataaagagagaccggacgcattacttcctaacctgggaggacagtcaggtcttaacctttgttctgaacttgctgcggcaggagttcttgataaatataatgtaaaagtaatcggagtccaggttgatgcaatcgagcgcgggaagaccgtatcgaattcaagcatgcaatggagagcctgggaatcgagatggcaagaagcgaggttgcttacaccgtagagcatgctcttgaaattgccgataaactgggatatccggttgtgcttcgtccggcttacacgatgggcggcgagggcggcggccttgtatataatgtagaagaattaaaaacagtctgtgcgagaggccttcaggccagtatggtaggccaggtactcgtcgaagaatccatcttaggctgggaagaattagagctggaagttgtacgtgacgctaaaaacaatatgatcaccgtttgttttattgaaaacatcgatcctctcggcgttcataccggcgactcattctgctccgcaccaatgcttactatttcagaagaagtccagaaacgtttacaggaaaaatcatacaaaattgttgaggcgattgaagtaatcgcggtacaaacgtgcagtggcgcatgatccgaagactgaccgagacatcgtaatcgagattaatcaagaacctcccgttcctctgctctggcatccaaggcaacaggcttcccgattgccctcgtatctgccatgctggcaacaggacttactctggatgagattccgtgcggtaaatgcggcactctggataaatacgttccgtccggcgattatattgtaattaaatttgcacgctgggcatttgagaaattcaaaggctctgaggataaactgggaactcagatgaaagccgtaggcgaggttatgagtatcggaaagacctataaagaggcattccagaaagcaatccgaagcctggagagaggcagctacggactcggccatgtgaaggattttgaccagaaaacgaaaaaagaactcctgtccatgctccatgtaccgaccagccagcgtcagttcattatgtatgaagctctgagaaaaggcgcaacggtagacgaactctttgagcttaccaagattaagcactactttatcgaacagatgaaggagctggtggaagaggaagaagcactgctgcagtataagggacaggtacctccgacagaagtactccgtcaggctaagcttgatggctttgcggataaatatctgagtgaaattctggaaatttcggaagagactgttcgtgatgccagaacagcggcaggaatcgtggaaggctgggaaggcgttcatgtaagcagcaccgaagattctgcttattattactccagctaccatattaaagatgaaagtccatgcagcgacaataagaagattatgattctcggaggaggtcctaaccgtatcggccagggtatcgaatttgactactgttgtgttcatgcggcaattgccctgaaagagctgggatttgagactatcattgttaactgtaatccggagaccgtatccaccgattatgatacatccgataaactgtactttgagccactgactctggaagatgttttaagtatttaccataaggaaaaaccgctgggcgttattgcacagtttggcggacagacaccgcttaacctggccgcagatcttaagaaatacggcgtaacaatcctcggaaccacacctgagacgattgacatggcggaggatcgggatctgttccgcgatatgatggacaagcttcaaatcccaatgcctgagtcaggaatggctgtcaatgtagatgaggctctcgttattgcaaaccgcatcggatatccggtaatggttcgtccttcctacgttctcggaggacgcggcatggaggttgttcatgacgatgaagctctgacatattatatgaaggaagccgtaggcgttactcctgaccgtccgattctgattgaccgtttcctgcaccatgcgacagagtgtgaggcggatgccatcagcgacggagagaatgtatttgtaccggctgtaatggaacacattgagcttgccggtatccactccggagactccgcctgcatccttccatccagaaatctgacgaaagatcaggtagatacaatccgcgactatactagccgcattgcgaaagaaatgcacgttgtcggcctgatgaatatgcagtatgcgattgaggatggagaggtatacgtactggaagcgaatcaagagcatccagaaccgtgccgctggtatccaaagtctgcaacatcaagatggtaaaactggcaactgacatcatgacatcccatctgacaggaagaccgtcaccggttccgacactgacagagaagaagattcctcattacggagtgaagatgccggtattcccgttcaagatgttccctgaggttgacccggtactgggaccggagatgcgttccacaggcgaggttctgggtatgtccgcaaatctgggagaagcgatttacaaggcacaggaagcaactcagacaagactgccaagttccggtaccgtactgctcagtgttaacgatatggacaaaccggaattgattgaagtagccaagggattctatgactgcggattcaagctgatgggaacaggcagaacttacgacattatggcagccgcagggcttccggctgagaaaattgccaagattgacgagggacgtccgaacattcttgataagattacaaataagaaggttgatattataatcaacacccctcttgacaagaaaggtctgggagatgacagctatatcaggaaggcagccgtaaaaggcaagattccgtactttacgaatatggctgcagcgaaggctacggttcaggctcttaagacgattacaaagaatggaaatattgaagtgaaatcacttcaggagttccacagcgagattaaatagagcgaatagattaaatagagcaaatagattaaatagagatatagagtaaaaacaagggtggaaagataaaaggataagcagccggttttgatatgccccagtcagacagacaggggcatatcattatatggttgcttttctgtttttaccggtgataacggcggtaaatgagatgaagaataaaagcgcccatgataatggcagcgatataggctaaatctccggccataatcccaaattgttcagcaatcgttgaaaaaaacggctgcgtcgtaggataatagggcgttatgtaaaacatgtccggataaccataggaccggccagaatgttgacagccgttgcaatcccgcagcatgccagaaacagcccggtggagccggtaaatcccttccatgatacagaacccatacctgaaaaagcgattaatagtccgataaaaacgagtaaaatatgccacataaaagaatggatggtcaggctccagtatggatgcatcattccgtacggagccgcaaaaacgaggatacttccgggcagattatagcagtacataaaagtacagagcagcctttcccacttccggccgaattttgctgtaaagggcaggatgaggcagagatacatggggatgctgcaaagctgaaatggaaaataccaccagtcgtatttacggccattgacaatataatacagaaacatctgtttataacattccgaaaggcgagcagaatccccagaaagaacaagaggcgtactctgtatgcccgcggcagacgtctgcagagccatgccagggtaaaggccgcactcaggccgaatagggaaaagcagatgtgaaatgctgaaaagggaagcggcggagtcattggccaggccgtttttatcaaccagtcttccataaaatttacctcactttctagtttgtagtataaaccttaataataattttgccaatagcaggaaacggttggggattatttgcataaacattcataaacttgtggaaaccataaaaaaatgtggcccaggtacttgattaattttaaaaatacgttataatgaaatactagaaaagaaaatttatatttatacatatttgatgcataaaaatggcgaatattaacataaatatgcggtcggaaacagcagaccgatcgtgggtttatgcatccggtatgacaagaggaggataattatgaaaaaacagattttagcattatcaatggcagcactgatggcggcagcacttacggcatgcagctcgaaaccggcagagacagcagcaccggagacaacacaggcacaaacagcagaggcagccccggagacagagggcgagacagccgaagcttctgaggaggcgacaggcggggcggaagcagccggcggtacacttgtgatggctaccaatgcagaattccctccatatgaatactatgaagacggggatatcgtaggcatcgatgtagaaattgcaaaagcaatcgctgctaagcttggcatggagcttcaaatagaagatatggcttttgacgcaattattccggcagtaacaagcggaaaagcagatttcggcgcagcaggcatgacagttacggaagagcgtcagagatcagttgaatttacagatacctatgcaaactcaaaccaggttgccattgtgaaagaagacagtgatatcacaggctctgatgcacttgctggaaaaattatcggcgtccagcttggaactacaggtgacgctcttgcaactgaaattaaagatgctacagtagagcgttataataaaggacttgaagcagtacagtcccttacacagggaaagattgacgcagttgtaattgaccaggcgacggcagaggcatttgtaaagaagacagaaggcatcaagattctggaagagaagatgtcagaagaagaatatgcaattgcaatcaaaaaaggaaacatggaactggttgagaagatgaacgaagcaatcaaagagctgaaagaagaaggaaagattgacgaaatcgttgcaaaatatatggatgcagagtaaaataaagatacacgtttaatattgttagatataagatggaggctggtatcagcctccataaaataacagataaggaagaaggatatgtggcaaaaattcactgaggatttctattttaattttatcgagaaagatcgctggctttacctggtagatggtcttaaaataacgcttaccgtaacactgctggcagtaattctcggtattgtcattggtctgattgtcggagtcatccgttcaacttatgagaaaactcataaactgaagatactcaattttatatgtaatctttatctgaccgtgatccgggggactcctgtagtcgtgcagttaatgattatttactatgtcattttcggcagcctcagagtggacaaagttccggttgccgtgttagcgtttggtatcaactcgggcgcgtatgtggcggaaatcttcaggagcggtataatgtctatcgataacggacagtttgaggccgggcgcagcctgggattcaactatcctcagacgatgtggtatattattatgcctcaggcatttaagaatattttgcctgcgctctgcaatgaatttatttccctgctgaaagagacatcggttgccggttttatcgcgcttcaggatctgacaaaaggcggggatattatccggagtatcacttacagtgcaacgatgccgctgcttgcggtggctgccatatatctgattattgttattatatttacccagttaattaaatgtctggaaaggaggctgaggcagagtgagcgctaatatatgggatcaacctctgatccaggtgaaaaatcttcaaaaaagctttggagccaataccgttctggacggtgtgacagtcgatatatacaaaggggatgtggtatgtgttatcggggcgtcaggctcaggtaaaagcacatttctccgctgcctgaatcttctggaggaaccgacaggcggccagattttattcgaaggcacagacattaccgataaaaaaacagatattaataaacaccgtcagaagatgggcatggtatttcagcaatttaatttatttcctcatatgacaatcctcgagaatctgacgctggcgccgatgaagcttcagggaaagaagagagaggaaactgaggctgaggcaatgaaacttcttgaacgcgtcgggctccaggatcgggctgcggcctatccgaatcagctttccggcgggcagaagcagcgtattgcgatagtcagggcgctttgtatgaaaccggatgtgatgctgtttgatgaaccgacatcggctctggaccctgagatggtcggggaagttttaagcgttatgcgtgatttggcggaggaaaagatgacaatggtggtcgttacccatgagatgggatttgccagggaggtagcgacacgtgtaatgtttatggacggcggaaactttgcggaagaaaatgaaccgaatgagtttttcgggcatccaaagagcgaaagattacaggcgtttttaagcaaggtgctgtaaaacgttctatataatttatgttacaggcaaaacgggactgtacaataagtcccaaaagaggaatcgccagttccggcacagtgccggttcaggcgattcctctttttagtaaattcaccaggtaataatccggtccagcagggccttttgttcctggcttgaacgggtcaggtaaattctggttgtctcaatgctgtcatgccccatcagatcggcaagaagagaaatatcattgaaacgttttaaaaagttctttgcaaatcggtggcggaatgaatggggataaacggtttttggatttatcttatatagtttggcaaagtgtttcaatctgagttcaataccccgcgatgaaatcaggttgccgtgctggtttaaaaatataaatccgctcctcgttccgcgttccatgaaccaggggatggcttccgcgcagagacttcgtgggaagtacagacgccgtattttgccccctttagtatatagatccaaataaccgagacgcaaatcttctattttaatctgcagtaattcacttacccgggcgccggttgcaccaagaaaccggatgacaaaataccagtacatatttccgtcctgttttaatctgcgcttcatgcgctcataatcccgctgagaaataacggtatcaagataactttttttctgttcttttacaggctgcattctgtagacgccgtcccttgttattttaaccggatttaagtggattggttcctgccagtcgggaggacctccggaggggagtgtcagtgaagcaggaagccggccgctctcctgtaaatagtcgaggtaacggttcataccgtaaattcttgtatttacggtattgagctgatagtttttgagcagatattccctgtatcttttcaaattttcgactgtaagctcaccgcaaagtgaaataaacattgagactgagcaggcataggaagtgagagtcttagctgagcgtccctgcttttccaggtatattttaaattgttctactgtattttcaagtgattcctccatgtataactccttttactgaagacggtggcctgttatcttgttaccagtccaccaccttgttgatgatttcatattgctcactgctggaacggcgcagataaatcctggtggtttccaggtttttgtggccaagcagatcggagaggagagagatatctccgcatttttcgataaagcttttggcaaaacggtggcggaaagaatgaggatgaaccacttctgggttcatcccgtaggcaagagccatattcttgagttggccccggattccaccgggggtaatggggttcccataccggtttagaaatacaaatccgcgttcctgtctgattgctttcaaccaggcaatagcatctttttgcagagctttaggtacatagatgcgcctgaccttatttccttttgagtagatgtccttatatccggtgaagatatcttcagcttcaaactggattacctcgctgacacgcgctccggttgcagccataaaacggataataaaataatagaggtatttctcatcacggagcagacaatttttgaggtattcataatctgcctcgctgattacattgtcaagataatttttatgctggatgcgcaccataggaatttttccaggattaagctttttaaactcaatatacgagttcagcgcccgaatccgcaggttgacggtctgcggcttgtaatgttccagaagaaaaaccttatacaatttcaaattggaatatgtaatttcgtggtatagtgcaaaaaactggcggatagcgtaagcatatacgtgaattgtattttccgacatattttgtgctgaaagatagagacggtaatcttcgatgctcatggcatgccggatagcggtctgttttgcatattcccttttttcttcatcggaagcaggttccggtgagagaatccctaaagcctgctcaggggcttcattgccgaaggacagggggatgcaggcagtctgtggcagggagtcggataggtatttcataatggaagctcctttcaaatgttaaatttgtgaatgtgattcatcgtaacagctcatactgtccgaactgtaacgatgaatcacaaggatcttggaaaggatgacatgataaataaacaggaaataccgctgcccgcgttctatttgaacagattttctgcataaatataccataattcatcccaaataaattacccaaatccatgttatcaaaaattcagtgataaaaaatcttatactactataccatcctattgattgagaatcaatgaatatttacttaataatacaagtaaatctattttatgttgaaatagtatgacaaaatagggtgataaaacatccttaacttgcgataattttccttatccgaagtataatgacctcgtaatgcaattaggaatttcgaaaaatatttcaaaaagaaaaaaaggagagtgcattaattatgagaaagcagactaaattagttgcagttttatctgcagcagctttactcgctatgggtgcttccatgacatctttcgccgctggttgggaaaaagatgattctggtatctggcactattatgatagtgatgacgaattggtaacaggtgagtggaagaaagacggcggaaagtggttctacctggatgatgacggcgaaatgctgacagacagctgggttgacgatgagtactatgttggcaatgacggcgctatgctggttaattcctggattaagacaacatctgatgaagatattgatgatccggatgaggatggcgatcattggtattactttggaagcaaaggtaagaaaacaaccgaatccaagaaaatcgctggtaaaacttactactttaacgaagacggcgaaatgcaggacggctggtatgaagatgacggagacgtttattacttaggcggagaagacgaaggctggagaaaagaatctggctggttatggcttgaaaaaccggatgatgatgacgatatcacaggatgtgatgatgagtgcagcatctgcgacgaggaaggctggtactacttcggaagcaatggtaaaatgtacaaagattataagaagaaaaaagttaatggtaaatactactactttaatgaacatggccagatgttatacgagtggattaacgacgctaaggttaaggttaaaggttccccatctaatgcagaagctgatggtaatgtagccacacctaataaggccgaaatcgaaaatatgctttacatgaatcaggttgaagaaggttggagagctgacggctggtacgaaatagatggtgctgaagatgttggtacggataatgatacagactggtactacttcgatgatggtgaggcaaagagagctgactccgataaagactttgctcaaattgaagacaatgatgagactccaatctggagagcaaagattaaaatcaaagcaagcaacaacaagtatttctgtttcgatgaagttggtcgtatgcagaccggtttacagtatattccggcagctaaaggtttctactactttgatgacaatggctatatgaagaccggtaaagttaccaatgtagaagatgatgatgattcctacaccttctatttcaacaccaagaacggcaaaaacggtgaaggtgtaaacggtgaaaaggataattatctgtatttcagcggtaagagactggaagctgatgatgattacagattgtacttatcagagggtaaagtttaccttgtaaataacaaaggtaagatccagaaatctaaaaccaagaaatatgatattgaaaactttgatgaagaagtaactgtagcatttggaaatggagattctgttaagtccctgactgtaggtgacaagacatacacacttcctgttgttatagaaaatgtaaaagatattgcaacaatggattccaaggttgcgaaagctattacagttccagagatcaaactgtatgacaatacttacagctatggagttgttacaaatggcgatatcgtaagaacatgggtcgctgaagcagataccgatgcattatctcttaattaattaaaaggaacctccccaggttgtaacttggggaggtttttctgcaatatactagcgggaacaaaatattgacaaaaagctgcaattagagacttgatttccttgttagcaaaaagcggttctgagaattacaagatagtaatcgcttccgattccatagattctataatcatcatcagcttccagtctctttccattccagtacagatatccactgttttctccgttgatacctttaccattaccaccattcttagtctggaagtaatatgtgaaggaatcattttcttcttctacacttgacattttaccagtcttcatataacctttatcatcgaagtaacagaatgcattctgggccggaataaactgtaagcccatctgcatctggcctttttcattaaagcagaaatactttccttccactttattttagctctgtaaacagtatttccgtcatctgttaactcaggaccagtaagtccagatttatcgtaataggatgcctttttagcttcaccattcttgaaataataccaatctgtatcgttgtttgtttcaaggtcttcagaaccgtcgatttcgtaccagccatccgctctccaaccttcttcgtcacagatatcaatatgatgccgctcaatcatcaaaaagatgaattagcgacatctcgtcttatttttttatatttacctagcgatacaaatttttaacatcacctacgttaaggttaattgcaagatagtatctgaatgatactgtatattaggaaacgaatcaattctaaaatcacgtttatattaatcgctttttatatagttccaatcatatcgcaaaatgaaattagaaaaatatgtctggactgtgctgctttcgcaatacaatcctgtgtaaatgaatctttagcaaaaatgtaataccatttcttttccatatagaacagtgagccttgtgctaataaatcattcaacacatcacacccaaccggggcgttctgccatttacattcacccagaagaatattatcatcatcaattgctgcaatatctatttcctcctggcgtttttcgacaggattattccccaccaacgtccggatttactgtaaataaacggagctttggctataatttgaggcaggtaaagatactgccgacatatctcttcaaagaccaggcccatataatgattcaactgaggttttacctgtttttcatagatgatgcttccaatgccccgaacaattccgctgatattcggactcacaaagcgataccaaaaacggaacatctgatcctccaataaataaattgttttccggctggattccttttccgtaatgggaacttcctttcggacgattcccagttcaatcagcgcctgtaagaggttgcttgcagcgccggtttctatcccagcctttgttgcaatttcattcattttactggcaccgccggcaatggcgcctatgacagaattatatgtggacggatcacggagttcctgttttaaaaggttggaaggttcctcgtagagacggccgctttctgtaaaaaaaagctccacaatattttcgtccaaagtcaatttggatgaaatgcggctgatatactccggtatacctcctgtaattccatataggattgcctgttcttccgatgaaaaggaaggacacatcgccctagtctcaaaaaaggtgaaaggatggattttaaactgagctgttcttcgtccatagagagggctctggtatcctaaaacctgatgttccataaaactcatagaagaaccgcaaagaattaggaagagctggctgttttgccagctatggtctatatgtgcctgcaaaagggacgagatagccttataacttgatgcaagatatggatattcatcaattaccagtataaggcgtctttccatgcagataccgtcaatatacgtcaaaagctcatcatagcttgagaatgatggagatggggcattcggattgacggtttggaaaacggctttggaaaattgctttagattctcctggccagttgcttcagatgcgacaaaaaatatagtctctttattacgacaaaattcattaatcagagttgttttcccaacgcgccttcttccgtaaaaaacggccagttcaaattgagcgcttgagtacatactctctagcttatttaattcacgctgtcttccaacaaacatatagttctcctttatatatattaaaattactaatttatgatttagtaattttatcataagttaatttatgatatttgtcaagggtttaaattttaaaccaaattcaacaggagtgtttgcttttaaataattattcatataaatgtcttatataatttctgttttcgattaccttttttcaataattacatctttccttacttttccttatccgaagtataatgacctcgtaatgcaattaggaatttcgaaaaatatttcaaaaagaaaaaaaggagagtgcattaattatgagaaagcagactaaattagttgcagttttatctgcagcagctttactcgctatgggtgcttccatgacatctttcgccgctggttgggaaaaagatgacgctggtatctggcactattatgacagcgatgatgagatggtaaccgatgagtggaaaaaggatggtgcttactggttctatcttgacgaagacggcgaaatgctgacagacagctgggttgatgatgaatattacgtagacggtgacggacgtatgctcgtaaattcctggattaagactctggctgatgatgaggaagatgatccggatgacggtggtgagcattggtattacttcggaaacaaaggtaagaaagttactgatgattccaagaagatcaatggaaagacatactacttcaacgaagacggtgagatgttaacaggctggcaccaggatggcgatgacgctttctatttaggtggtgaagacgaaggctggagagctgagagccagtggttatggcttgagaaatccggactcgacgaagatgacttagatgatgatgacaacctggaagttgttctcggctgtacagaagatgacgactgcgatgacgaaggttggtattacttccagtcttccggtaaagtttataccggcgcaaacaagaaaaagattaatggaagatactatatgttcaacaatcatggccagatgctgtatgagtggattaacggtaccgcaaagactgtaagctcaaatgcgcagcttgatggtgtggcaagtgctggttccgcaagcgttgaggatatgagatactacaacgctgttgaagaaggctggagagcagacggctggtatgaaatggatggttctgaagacgtgggtacagatggtgatacagactggtactacgtagatgacggtgaaatcaaatacgctgatggcggttataaagacgaagccacttacgatgaagatggtaagatggtttacgttcagagaatcaaaatcaatggaaaatattttgcattcaatgaaaaaggccagatgcaggatggtttacagtatatcaacgctgacagcggcttctactacttcgacgagaatggctaccagaagacaggccgtgtaacaagtgtagagtgtgatgatgatgattacaccttctacttcaacactaagaacggtaagaatggtcagggctacaagggactgaaagatgactatctgtactttaacggtaagagactggatgctgatgatgattacagactctattactatgatggagacatctatctggtaaataaaaagggtaaagttcagaaatcttccaagaagtatgaccttgaaaacaagggaattgctgaggatgatgtagaagtaacaatcagtggcaagaaagttaccaagattaaaggttccaattttgagtatactgatgatgaattagttgctgaaatgattaacgaaatcaacggtaattatgaaaatgttactgacgatatgatcttatcagtaccgtttatccagctttacgatgatgacctttacacttataccgaaatcaagaaaaattcaaccccaacagaaggttggttaggacttaacaacccaaataaataaattttataacaattcaaaattctatgattaaaaatgggcggtggaaaatccaccgtccattttaaataaattattcagctgttaattcacctaaaaagtcaccatctgcagcagctctggttaatggtttttcagtccaatcaccatcatacagtgcaatatgcggccattcatatacaaacagagtaccatcgttgaatgctggtttcgtcagttctttatctgtataaagtccttcaaccgtatcaccgttaccgaattttacgtaaagatcatcgccattttcttcgatatcatatttcttggaagaggatttctgaatcttaccggatgcattcactaagtaatatttatcattaactctgtagattctgtaatcatcttctgcctcaagacgcttaccgttccaatacagatatcctgatttttcaccaatccagcctctgccgtttccgccattctttgtattgaagtagaatgtaaaggcgtcatcatcatcttcaacattggaaacttttcctgtcttcatataaccattatcgtcaaagaaatagaaaccgtcttttaacttctggagaccagtctgcatacgtccatactcatcaaagcagaagtacttattattgcttgctttaattttgattttttctctgaagattgctacgttatcaccatcttttgtgatatagtcctcagcttttttagcttttccatctttgaagtagtaccagtctgtgtcattgtcggtattcgtatcctgagaaccgtcaatctcataccagccatcagctctccagccttcttctatctgattcatgtaaagcatatcacttggagatgcaccagcgttatttccatcaagtaccatgttaccattggaacctactgctaccttggaaccattaatccactcataaagcatttggccatgttcgttaaagaagtagaatctgccatttacttttttcttcttagcttctttgtacatcttgccgttgcttccgaagtagtaccagccctcttcatcacaaggatcattatcatcatcagtacagttaccgatctcatcgtcttctgatggtttttccagccataaccactgattctctgatctccagccttcgtcttctccacctaagtagtaaacgtcaccgttttcagactcataccagccatcttccatacggccttctccgtcaaagtaataggttctgccgttgatttttttggaatcgctggtaacttttttacctttgcttccaaaataataccagctgtcgccatcttcatccggatcgtcaacttcatcatcaacagtagtcttaatccaggaattgatcagcatagcaccgtcgttgccaacatagtattcatcgtcaacccaagcgtctgtcagcatttcaccgtcatcatccaggtaaaaccactttccgccatcctttttccattcgcttgttaccatctcatcatcgctgtcataatagtgccagataccagcgtcatctttttcccaaccagcggcgaaagatgtcatggaagcacccatagcgagtaaagctgctgcagataaaactgcaactaatttagtctgctttctcataattaatgcactctcctttttttctttttgaaatattttcgaaattcctaattgcattacgaggtcattatacttcggataaggaaaattatagaagccgacaatgaatggaaagaagagctgaagaaaattatattttgaattacataaatatacaagaatgcggcagatgcagattatactttagttcataatctgcatctgccgcatataaatcgccggataaactaacttaccgctaccgggccctattcatctgcatccccgcaattgcctatattaaatttctccatcaattccgtcagctttcgtatgcagtaatccatctccctgagttcttcatccgtataggaactgagtccgtaaagagttgattcaagcatccccctttttatatcgtccatcatcgcacggccgcggtcacagatacgaatataaacacgccgacggttttccttatcgtggatgcgctccaccagttccttttcctctaaaacattgatcattttggaaagctgctgcttggttatctgtaatttatcggcaagttccgacatggtataatccacatcagcccaattatcaagtgccaccagggtgaaaaaggggagggaatttactttgacgtcattttcatgctggtactggcatttggccagagtaaggaaagcaacggcaaattcaagaaaatgtacacccacggaattaatgtccgggtttccgccgctttcacaatttattctgttttctatattctccataaataactcctccaaataaaatataaagttaattacaagcatattagtagggaatcagatgattagcccacgttcacatcctagcatatttcgaaatacaagtcaatatttattaaaattaaataaatattgactattaaatattgacaaatataaatataagaggtatatatttaataaatcagtgcgatgaaaaaattgaaggagattcgtacaaaactccgccaattttaaaaagcgcctgatatggttattatataaaacaatgatacaaataagaggagaacaacatgaaagagagcaacgacggcaataaagcacctaaaaaatctttcctatattattatggactggtcatgctggtattgatgctgcttaatatttttatttttccgtccctgatggaccggacggagcaggtcagatacgatcagtttgtagatgaactgaacaagaaaaatgtagatgaggtttatgtaactacgaatggcgaaatagtatacactctgaaagacagtaagtggaaaattaactataagacaggttcatttccgggagacgatttgcagcagcggattacggatgccggcgtagtgaaatacagctctgagattccgacccaggcatcccctcttctgaattttctggttacctggattcttccgctgattatttttattggacttggccagctgatgagccgtgcaatgatgaaacggatgggcggaggcaacgcaatgacatttggaaagtccaatgcgaaaatttacgcggaatcggagacaggcaagacatttgccgatgtggccggccaggacgaggccaaggaggcgctgcaggaaattgtcgatttcctgcataatccccagaagtatgcggagattggcgctatacttccgaaaggagctttgcttgtaggccctccgggaaccggtaagacgctccttgcaaaagcggttgcgggtgaagcgcatgttccgtttttctcaatatccggatcggaattcgtagaaatgtttgtgggaatgggcgctgcaaaagtccgcgatctcttcaagcaggcgaatgaaaaagcaccctgtatcgtatttattgacgagatcgatacaattggtaagaagcgtgacggtgcaggcatgggaggcaatgatgagcgggaacagacattaaaccagcttcttacagagatggatggatttgacggacggaagggtgttgttattctggccgcaaccaaccgtcccgaatcattggataaggcgctccttagaccgggtcgctttgacagaagaatcccggccgagcttcctgatttgaagggcagggaggcaattcttaaggtacactcaaagcaggtgaaaattgacgaaacagtagatttcaatgcaatcgccagggccaccagcggtgccagcggagcggagcttgccaatattattaatgaggcggccctgagggcggtcaggatgggaaggaagaccgtatcgcaggccgatctggaagaaagtgtggagacggtaattgcaggatatcagagaaaagacgccggcgtctcaacggatgagaaaaagattgtatcctaccatgaagttggtcatgccttagtagcggctttacagagccattcagctccggttcataaaattacaattataccgagaacatcgggtgcgctcgatatacaatgcaggtagaggcagatcagagatttttgatgagcaaagacgaggcgtttaataagattgtgacactgacaggcggccgggcagcggaggagttgatctttcattccattacgaccggcgcatccaatgatatcgaacaggcaacaaagatagcaagagccatggtcacacggtatggtatgagcgaacagttcggcatggtagctctggagacggtgaataatgcgtatctgggcggagatgcttcgctggcctgttctgcggaaactgcatcaagaattgacaatgaagtaatagagatggtcaaagatgcctatgagaaggcaaaatcaatcttgatgggaaatgagaaaaaactccacgaactggccgattatctcctggaaaaagagacgattacaggtgaagaatttatggagatactcaacgaaaaagccggagccgttggtacggcggaaattgtcttggagattgaatcttaaagacacctgcgaagcttagatgcagagtccccaaacgataaaatattgtcctctgaatgaatattaaaatgtacttataccctggtgcagaattaaattgccgccagggtattttcattgatggcggtaacctgtgcgcggagcgtgcaggttatcgttctgccctggagtaaggggcataaacagaaatcaggtataaacagcggtttctaacttatatgaatgtatttatgacattttatatcctgccggaaaatcgttataataaacacatccctcatgagaacggatggaaaaagaaagtttcagtatagaagcgaagagcctgtccttgcaaagcgcgctgcgggacggtatgaacggaggaacagatgagatttgacgttgtattaaaaggcggccgtgtatttgacccggttcaccatgtggatgagcgtcttgatatagggataagagaaggcaggatagcggaactggaaaaagaactgccgcatggtgaagagacatacgatgtttccggcctgacggtgattccgggggtcatcgacatgcatgtgcatgtgacaaagctgctgggcgcagagtcgggtattatatggcggccaaaaccggagtgacgacgattattgattacgcggggcctgtgaccgatatctcatcccagatttcatcacacggatgcggaatgaacgttggctgtatcgacgcagtgcttcccggagaggttggacagtcgccctccagaacgcaggtcagaaggtttctggagcaatccctgaaaaacggctctctgggacttaaaatcctcggcggccattatcctcttaccccggagtcttccaggctgtgtgtggaggaagcaaatgctaaaaaagtaatgatagcctgccatgcagggagtacgcagcagagaagcgatatatacggcttacaggaagcggttgaatttgcgcgggacagaggcttctgatggcccacattaatgcctactgccgtggaaaccggtatcattacctggaagaattgagagacgcatttcagatgctcagagaaaatccgaatattatttcggattcccacatggctgtaaacaacggaaccagcggtgcatgcaggaatggaataccctgcgacgctatcaccgtcaattgcctgaagatgtttggttacgagcctacccaggcaggactggcgaaagcgatgaaggacggaaccgtttgtgcaattgcatccctgaaagaggaaaacgtactattaaataaagaggatgcattccaatactggtccggccgcgacaccaacataaatgtgagctttcccgccaatctggccccggttgcgtcggcttgcctgacagagcgcaggatacctggcagctcccccttaatcgagctggcggcgacagatggcggaggatttcccagaaacggactggtacagaaattactcccgttttacggcttggatatttgtcactgaaagagattgtggaaaaatgctcggtcaatccggcggagacgttcgggctgcaccaaaaaggaaatctgggaatcggagcagatgccgatataacgtattggatatgaaacgtcttgacgcggcaatgagctttgccggcggaaaaagaattatggatcacggccgggtaacggggagcggaggaacgtttctaaccacgaaagccggggtgaaaacagcgcaggaaatgcagcttaactatcagattgcggatacgcagcgcagcgcattatacggagagcggacggcaaaataaatactcagtgacagtaaaggagaggaatgtgttgaaaaatatcagtgttttgactttgggagggacgattgcctatacatggaaaaacggggttcctcaaataggggatctgacaggttttatagattcacttgatgaggtgaaaaaagaagccgatattacggtgaaggcgttcaggcaaaaatcaagttcttcgatggtgataagcgatatcaccgggttagcggccgaaatccagtccttgttagaggggagacagagggcgtggtggtggtccaggggacggacacaatcgaggagacagcctttgctttggagatgctgctggattcagaaaaaccggtggcgtgacaggcgcaatgcgaaatcccgacatgaggggagcagacgggccggccaatcttctggcggcaatccggaccgtctcctgcagccggtgcagagaactcggcgtgatggtagtttttaatgatgcaatttacccggctttatatgtgagaaaaattcatccacagagtaccgaggcttttgcggcagaatgcggacctctcgggtatctggcggaaggaaagccaagcatccgtatgaagccgctgcaaagaagaatccccgacttgcaataaataagtggaatgtggatggaaagaccggatcagcctgtatccgttccaatttacgccgttcctgtcacggagatacggcggacagggaatacctggtgaagagagcggccgaatatggtattacccctataaggcagtggcagccgaatggagggggcgatttactccggatgacattgagattgcggagggcgaacgattcagtcaggggagcctgaacttttatgtgtcagataagttggaggatggaggctatcgaatgatttgcgagacggaaggagcttctgggaatgacagcaacggtacaatggtgccgataaactatgtgcctggactggctaccgcacagttgacggagcttctcacgccgggtaacgatgaggaggaaacagaggccttccggaagcgctatctggccgccgtccgtaaaccatccaccagtggcaatgtctatgactattatactgggcgatggagtgcaatggagtgggagcggcgaaggtgtttcccctggctgatggtcccgggacggtaaaggtagtcattgcggacgaggaccgcagtggagcaagcgctgcccttattaataaagtcaaggaacacattgaggggctgcgacccatcgggccaccgtggcggtggaatcagcaacagagaaagcaatcaacgtggcggccgacatacgcattaaagatggattgtacttgggaactatccaggattcctttagccgagcggtggatgaattcctacagcagaacgcatttgagatgacctatgtaagtctggccagaataggcagcttgttactgggcattcctgggttgaggacttttctgtgctgttgctgaacggtgaatcaaaaaatgtagagttaaagaaagatgaaattgctgtggcggggacggtaagtctggaggtgatgtagtggagattaccagatttgaggagaagttaaataaggtcgatggaaatatatacgtcattgaagaaaaggtgcagttaagtgatggcgtttataacggcgaactaaagcatgacaacatcaatccgacaacactggcgatatacacaggccccaggctcacgggggataggatccaaaccttttcgttgtcaacgcccagcctgactccctggaagagaatcattaaaatattgctgatgtggtggaagtgtatatcagttatgaaactgatggagacacggtagaggccgaagatataaatcggctgcaggaggccacggtaaaaactcagagcgcagtcaactcagaatatgagcgtgctgcccgaacagagagagaactgggggagtcactcgatgctgaaacacagcgggcgaaagacacagaggcagagctgggaaacaggctaaacgaggaaagtagtcgcgcccaaggagaagaacgagcactgcgcagtgatttactcagcgagagcgagcgggcaacaatgcggagaacatcctgttaaagaaaatatcagaagagacggagagggcgaaggcatctgaggccgttctctctcagaatctacaaaccgagattgagcggtctgaagcggcggagcagacacttgcaactgaaattactgaggagacgagacgagccggggctgcggagaaggtcttaaccgacaatcttacggccgaagtgaaccgcgcaaggcagcagaaaagtgaatgaggatgcattatcagctgaaaccactagggcgaaagatgcagaaaagaactcacagataacttggcctctgaagtcgccagagcgaaagctgctgaaaagggaaacagtgatgctattacggcagaaaacaccagagctgctacggcagaacaggtgttgagtacagacctgtctgcccacaaaggaatgtatcaaatccacataaagtgacaaaggcacaagtgggactcggaatgtgacaaatgaatcaaagaccactatgttcaccagcccagtattcacaggcacacccacggccccttcggcagccgcagaaacaaatacccaccagattagcaacaacaaaatttgtccaggaggcaatcagccggggaattgcagcgtcggatgcaatgatttttaaggggactttgggaacaggaggaaccataacagccctgccgacgacgtatcttaccggttggacttatcgggtactcattgccggcacgtatgctgggcagcgttgcgaaccggggacttggtagcggcgttggcggatcgtaacggcagcggaaatctggactcggactggaccgtggctcaggctaatattgatggagccgtgctgtccacgcggaaggtaaacgccgggaacggattgaccgggggtggcgatttatcgacggatcgcacgatacacgtcggggccgggaatggtgttacggtaggcgctgatgcagtagctgtgaagccaaacacggccggtacagccggggcagtcggaaaaacagtggtcgacgccaacggcgtgggagtcgctttgggaaactcatccaccaccgccttccgaggtgatcaggggaaaacagcatacgatcacagtcaggcagcacacgccagaaccgacgcaacgaaaacagaagcctccgcaacaaatgggaacataaagataaacggaacagagacgaaggtgtacacgcatccggcggggactaatccacatgggacaacaaaggctgatgtaggcctcggaaatgtgtccaatgtcgcaaccaatgatcagaccgtcacctacaccctggcgcctccctttccctcctgtccagcggagaaaagctgtcagtggcatttgggaaattggcaaagtcggttgctgaccttatcgctcatcttgctgacgccgtaaaacatattaccgccgaggagcggaccaaatggaatgccgtgaccaacaaggttgataaggtgtcaggtaaacagctctcaaccaacgattataccacggcggagaagaacaagctggcaggaatcgccgcaggggcggaggtcaacgttcaggcagactggaaagtgacagacacagcgtcggatgcctacatcaaaaataaacctacgtctatgcctgcgtcggacgtcgccgcctgggcgaaatctgcggctaaaccatcctatggatggacagaaataaccggcaagccagcaacctttgtgccgtcatcacacacgcataccaagtcgcagatctcagacatgcctacaaagctgtctcagtttactaatgataccggatatctgaaggaaagtgacattgacaccagtcagaaccacacgcatgctaataaatctatcttagacaaaattacgcaggcactgtttgataactggaacgctgcttttttcccacgtgagtagtaaaagtaatccgcatggagtgacagctgcgcaggttggcgccgcagcctcgtctcatagtcataccaacctgtcagcaatagatatcaccggacagacagttgatgcaaacagttacaatttatcgtctggaagtccgcaaatacagttctattccgagaagacgagcggcggagcggccaatattacgaacattcctgtttccggacagccgtttttattaaaggtagaattgttacggtggtcatatgcaacagactacataacaaagcagacatttttatctgcgacagctaaaacgacttatgaaagatattgcacaaatggaacatggggatcctggcttccgattgctgttttcaatgccacgcctgtttctggccgagttcttgtttcagacgggacagtcggagggatcaagtcatccgcgtatacgattgcatcatcggtgccgtcgggagccaagtttaccgacaccgtatatgcgcatccgaacagcggagcggtggccggaacctaccggagcgtaaccgtaaatgctcaaggacatgtgacggccggaacgaatcccacaacgctggccggatatgggattaccgatgcggcagcgaaaaatcacaaccatgacggggcatacatgccgaaggggccgttctcctgggcccagatgcacggagcatacacctggaaccagcttaagggggtgtaaatatgtatggagttgaaaaatacggtaagttaaagtatgccctggaagaattagagccggaaatacaggaggaatattttacagatttgtcgctttatgttccctcttttatttcctcaataagagaaatgaaagaaatataccagacccagggaagggaaatgggactgcttcgatactatttgtacgaccttctggcccagtgctttgtttccacttctgcctggggaattacgaggtgggaggaactgctgggaattacgactaatttaaagttatcttatgagcagcggcgtgaaatcgtactggctaaaataaggggccagggaacgacaacaagacagatgatcaaaagcaccgcagagtcattcagcgggggtgatgtcgatgtggcagaagataatgagaaccaccgctttattgttcggtttataggaattaaaggaatacccaggaatatgcaggcgtttgtcgccatgctggaagatattaagcctgcacacctggaatacaggtttgaatacacctatacgacatggaacagtttgaaaattttcacctggaatgagcttctgccgaaaacctgggatgaaatcaggattatgcgagaagtggagtatgagaacgatgattggaagagtctggggctttatacctgggacatgatttactggaaaacctgggaagaaattaaataggaggtaatttatgcagtacacaacaaattataatttaaaaaaaccggaaggatccgatccggtaaacattcaggactttaatgataatgcggacagtctggatacagaactgaagaaaagagtaatagcagcagggggagacatctctaacacgaaaatcgtgacagcggacagtatcgcaacagaatttcctgtccctgcagcaggagatacgccaaaaacattcctcggaaagatgaaaaagtttgttgaggactttaaaaatataaaaacagggcttttaaccgttggaatgctggttaatgcaaatttgcctttaagtgccgctcagggaaagttttgatggatctgtatactcagttaaatggcgagatgcaaggaaaagtttttccttccagtctggctatacccttttagtttgcggttatgatgaaaaatatcccgacgtcctatatgtatataacataaacactaatgaattgcgttatgcgcgactgacaaacaatgaataaaatggcgagttggccagttctatgattaaagggctatacgtgtacccgaaaacggttctattcttgatacagccaaaaattttattggtagtaatggaatccattttctaaccgtagtacaaggaggggacattcctggcgagtttaggtatagctctggctttgtccttagttcttttgatactttatcaattgttattttcagccgagaaaacagcaaaattgccgttaactcctggatttcaaataccgctaacaagtggaccggatggcgctattttacaggctctgccacactgtaaaatggcgaaataggcacgcttaaatcagtatcaggtaccacgttattggcaatggaaccagagaggaactagaggctacatctctcactttagagcctggagtatggataatcacgtgttacagtgaattttttgaaggaactattcctacaaattcaatttataatacaactttacgcagtaactctaatggtcgaataatgactgttcgcagcactacaacaaacggtgggggtattaatgtcatacacgtagcaaagattaatgctgcagatacatttaaaataacctcctttgattacgatttcggaggcagtgtaaaattaaatataaatatgtatgccgtcagaatcaaataacaagtaaatggcgagagttttattgtcagggatggaatacgcgggaatgatgaccttaacaacattgttgtcccggggtattatcaacttagctcatcggcctccaatagtgtcgccaatccggctttcagaagtacatctattgttgaagtaatcacaacagactcgtacattgttcaaagacaaaccgggccaagtgaatctaagtatcgtttcagggattctaatagtaattggggggcctggttataattcaaattaaatggcgagttgtgttaccgtttcacgtcaaacgtgtccgaaagcccgatggatacctttaaaaaaaattggtcagctttgcctgaacttaaaacttctattggtgcagtggcaaatataaattttgccgcaggtttcattgtttataaacactctgccaattatggtgcagtatatatgttttcgtacagtgacgcttatccagttccgatgtttgctagacttgtaaacggcacatggattagtccataaatcgtaatcccgccgaatccaaaatagtaatttagctgagaaaatcttacaaaaatcagggcgaaagaacctcttttttgatattgtagagatatcaggaaggaggtttttgagtgttagaggaaatgttgatgaatgttgtccaggcgatgagtaactgtctggacgaagaacagttggataagcttcaaaatgtgctttatatccagttccacgataaaaaaattgtggaagaaaaaaacgagctgcaggcaactggaacggatagcgatactgctaaaatcaggttgtttgttgccagtaaaaaagtatccggccggcagaacaatacactggcccagtatgtaagggaaataagcaactgccgaaacgccttgaataaaaatatcgaggacattacaacgatggatttgaggtggtacttcggaatgttgagagaacataacaatatcagtatggtaacgctgcagggaggatgcgataccttaacagtttctggacattcctgcaaaaagaaaacatggtatcggaaaatccgattgccagaatagaaagtttacgtattgaaagtactataaaacaagccttttcggcaaaagaaatagaggcattgagactgtcatgtacccgcagccgggatagggcgttgattgaatttttatatgcaactggtgtcagggtgagtgagctttgtagcttaaaggtaggcgatattgatttatataaacaggagtttaaagtcatgggtaaaggaagaaaagagaggcatttgtatgtgtcggatgtggcgtgctttcatcttttccgatattttaaggaccgtatgcaaagagaaggattaacagttgatgaactggccgaaaggcccttgtttgcggccgtgaaaaagccgtatacaggtataacagtggctggagtgcagtatctggtaaagcagttggggaaaaaggcaggagtcggcaatgtgcatccacaccggttccgtcggacctttgcgaccgacttgctgaatcgcggaatgcgaatcgaagaagtaatggtcttgatggggcataccaaaatagagacgacattgatttactgtaatatcaaacaggataatgtccgggaatcttaccgtaaatatgctgcctaaggggtgatggaaagcatttttttagtcagccgagagggtggcttatttggcataccaaaaaacaggataggtgacataatattttatggggttggggatatgagatgaaaaacaggtaaatttgcgtaaggttttggcagttaaattactattttgaaatattatttcgagttctgctgtcctgttacaacgtacgccaaccagttgggtaagccctatatgcaagttcggatgtatccatatttgaagcaaacgtaacataataatttgagaccacatagctgattattagtattctaagagcagtccatcctaaaggcttgtttttggtgttgttgtcagttatgccgcaagatagccctggggcaggaaattaatatcagaaatggtgttttctctagcgatagtttcaatctcgccattttatggttgacgaataaataaaacatttataaaaatcgcatcgctgtaactggtgccgcttaagttatctacatatattgttactgccgaattagatgatatccagcaagctcgtgggagaactttagcttgtcttgtatcggtgatgactgctaaaacaggtttatatccatcaggagtgtttatcggtatggttgccataccgctgttgccactcggaaccgtaagggtattactaaattggacagttttgatataggttttcatttcgccattttgtattgttattttcgtggcgggattacacttttcaaatgcaaaaaccgctaaatttcaacccatccacccggacttaccctaactgcaaattttccattaatggcttctccggcaaattggattttgtaatttgatacaacaaaactgacaataataattctggtagctgtccatcccaatggtttgttctgggtgctgtcatttgttatataccaattagcaccatccgggatagtgtcgatgtcgattacctcatttccatattttagcgggtatcctcccatagacaacatctcgccatttaagcaagggaaaaagccctccatcctgaccaaacatttgataaataacgggcgcgaacatgcaaagaagtcatgtcattggtaaaataaatttgtgcgcaaacatactgcgtcctaagtacaaatagtagccctgttatattgacgggatagtttttacaaccggaggtatccggagttgatccatctgagtaaatacctgtcttttcaatagtattaaaatcaaggccaataaaagacctgtatgtcgaaaagttatcgccattttgcattgttttttcggattcatcgattatatatagcgatataacaaaaccaccaattttcagatggtttcagcctgtttgtagcgattttgaatccggaagatgtcgcccctgtgattactaacccatctacatatgtaagagtaattgtagtgtcttcccacatagcaaatacttttggcgctccgcgcataggttctggaaaattaacggtaatttcctgcgtgccggtattggccggtggaaatctatctactccagttattatgtcgccatttaaacatgaaaattaggtcctttgggacctttttatatataaaaaatagaaaggaaatgaaagtatggaaaaattaagaattggaatgaatgaaaaggagtatctctatagcagcattcttccggagtcggccacagtgctacggattatctttgagagtgcagtaccggagagctggggagatctcactctcattacaacgggaggcgtggaagctgatacattgacgggatacaatacagtttatcgacaggaggggcagacagtatggttatccaatgacggcagcgtttatcaagagcctgtcccgatgccggaaccagagccttacgatccgcctttgtcggatttacaggcggctaaaaagtcagaggtggcggccgactgtgaacggcttatctactccggcgtcaatgtcaccctggcagacggcagcacagagcgttacgccctgaccatcgaggatcagcttaacctctttggtaaacagtcccagctggcagccggggccgcgcagctggagtatcatgcggacggtaagccctgccggtattacagcgcagcggacatgcaggctatcatacaggcggccatgcagcacgtatcctatcacaccacctactgcaatgccataaacatgtggatcgccggttgcgagacggctcaggagctgcaggcagtgttttacggcgcagatgtgccagagcagtatcagtctgacgtactcacggcgtatctgcggcagatggctgccgttgtgggaggtggtgcggatgcttcggaccctgtataaacacctggcactggtcgaaatcggaggattgatttacatttccctggaacttgcctggcgcggccggagtcattggactatgtttattctgggaggtctgtgttttttatgtctgggacttattaatgaggtactgccctggcagatgccactatggaagcagatagttataggggcctgtttgattacagcgttagagtttatgacaggatgtattgtaaatctttgtctgggctgggccgtgtgggactacagcagactgccgggtaatgtcctggggcagatatgtccacaatattgcctgctgtggctgccggtgagtctggcagggattgtcttggatgattggctgcggttctggtggtggggagaggaacggccgcactataaaataatttgataaggaggtaggtgaatgtgacagacgaagaaattgcagtaaaactggaagggcatgatcacgaaattggttcgcttaaacaccggatggctgaccaggaagagcagagcaagacaatccaggagcttgtcctgtccgtccgggaattggcgttgaatatgcaggcgatgataaaggagcagagcgcccaaggagagcgcttggcaaagctggaagcagagccggcggaacattggagcagtatgaagcggacgatatttaacacgatggtaggagccgggccggagcagtggcgaccggacttatctatattatggcacagtatatcagataagaaagcgaggaataattatggattttggaattgcaagtgtagcaggaattacagcactgtgttatctggccgctatggccgtcaaggcgacatcggtagacaacaagtggctgccagttatttgcggcgtaattggggccgctctgggtgttgtaggcatgtatacgatgcccgattacccggcaacagatatcatcaatgcggcagcggtaggcgttgtatcagggcttgcggctactggtattaatcagatgtacaagcagcttaagggcaacagcagtacatagacctggagcttccgggcctttttgattggaggttaaaatgcagatacatcaattactcacgccttataattacaaccccggccagttaagccgcattaaatacattgtcatccattacgtgggggctaccggcggggcggaggccaactgccggtattatgccagtcagcgcatcggggccagcgcccactactttgtgggctttgagggagagatatggcagtcggtagaggataagaatattgcctggcattgtggcgcgaagtcgtacaagcacccggagtgccggaacacaaacagtattggaatcgaactttgcgtgcggaataaggggagccaggcagacaccagccgtgactggtactttgaggacgcgacagtggaggcagcgattgccctgacaaaagaactgatggctaagtacggcgtcacggcggaccatgttatccggcattacgacgtgacaggtaagatatgccccaacccatatgtttataatcacacgaaacatacctgggatgcatttaaggcggcgttgtctgggcctgagaaggcagttggagactgggaacacgatacccagggaaaataccgttaccgtaagtctgacggccgatatgccacgaatgagtggcagcttatcaatcatcactggtaccttttcggtaaggacggctacatgctgaccagttggcagcgctggaacggcagcagcgtcatcgggctggatgaaccgggagactggtatttcctcgacaatacggtggatgggccgttggagggggcatgctggcacgagcgggccggagggtttggcggtttggagatatggtatatagcatagaataaaattaaaaaaggaatgcagtagacgattcagtctattgcattctaaaataaaaaatcttatatatggcgatagataatccacattacaaaatcggctattaaaaaaagaatcacgaatatattaaaatagaatacgtacggaattctcattcgaattttttttatgctactacatctatgcttttgaagcgtgcaggaacaacaatcggctttacatcctaaaaaaagctccttcccgattatttttccaataaggtatagcatcacaacgatagagttaaaaagacaaattgcacacaccaataaaataaaaacaagttttaaaataaaagtgtttgaagctgcagtaacagcactgccaataaatgttaggcttcctgaaaatgcaataacaattgctgcaaatatgcttaaaacagaaattagctcggtctgtatagactcagccttgttttggactgcttttgcagtggctattgcctcctctaactttgcagtgcttttttctacgttcaatgacacattttcgattttttgatccatcataagcatagctttttctttgttagaataatataaaactctacttatttccaagtttaaatgatcacatagcttagcaaattttttatgtatattactaagctcgctgtcatcgatatctttacactcttcaacatatgatcttagcgtttccagattcgaagaaagatagtctaagttatactttgtatcttctttattcatatttaaaatcagtggaaagaaatccgaataattatgacgaaaatcagcagagtagatttctttaaatatagaagttactccgctgacttcctcctcatttaacaacttttccgacaacttataaagctgtttttcaagtctatcttgtattttttcacgttctacggaaagcatgattacctctgtgattcacatttattaattaaagaaaatggaattacatccctatttccaatcccatttttgtaaatagtatcccaagctcctcctgttatatgcgtttggttaaccaacacactggctggaatatcaacatatttatcgatgatttggtctaagatatatgaatcaaaatctctaatatcagtaccatctattagaaatctaattggcctgccaccgtatgagcaatattcattatacacttccggaactacagggcctaatggccatgcgcaaataggttcatagaagaggtgccgtgaagttttcttataaaagtcaacccatgcataatataacattttttgcagttttaagttactaataggttttccacgttgatatgctcttgaaataatataatccgcaacatcaatagctctatacgacattcgctcacctccctaacgacaaatttatattattagtatatgacattttgcacaaatttacaattgacattttagctaatttgtgtattgattttttgagtaattttttattttagtacttttgcatagtattatatttaataaatgtggtagacataccgaaatggaatagatataaaatatagtagataaataattaataatataaaaatagtcacaaaatcaccaccttatccgtttgttggaaatagggggcaaaaaacaagcctgcgctatcattaaatatgggcgacgccgggagacaagctctccgctggcctcgccctgcatatcctactctccaggccccggaccctcaactggggcctctttattttttaactcttcagcaattttcttaagctcttcgcgtatttcttcccggctatatttcggccttttgcagggcaattttcccgttttgcaaaaatggataatgtggcagactaagccagttgtaatacgagcaacaacggaccagtaataaatgagattgtttttaatccgattctttttcattcagtatccccttccttttgtaatttattgtactactttggtgcagtgataaagctggtaaaaactgggaataatatggcttattatactgaatataatcagtatattcaacccctatgccgcaaagtatagtaaaggcaagagaggtggaagaatgataagttataagccgttgtgggataaaatggaaaaagagaatgttacaacgtataagctcattaaagaggggattgacaagaagacaattcacaatttgaaaaataatgcgaacattacaatgcttacggctgaaaagctttgcagaatattgaaatgcgagataggggatattgtagaatttatagatgataatggcggcaaggagtgatccggccgccttatttcgtgtgatatttcgtgtgatactttatgctttcgtgtgatattttcgtacctaaatcggtataactctactaagattaaaacaatgaaaaaccgcgtaaatacaaggtttcttgcaaatacgcggcttctcttttcaatggagacaacaggactcgaacctgcgaccctctacacgtcaagcagatgctctcccagctgagctatgtctccatagaatgattataaacgataggaatggatttggcaagataatactgaattcagatcaatctgcattccacggtataaaatccagatattatcagataataagcctatcaatctgcaaggagcggctaaatatggagcagccaatcatccttcattccgacatgaataatttttatgcttcagtagagtgcctggacaatccgggcctgcgcggaaagccggtagccgttgccggagatcaggaggcgcggcacggtatagtgctggctaagaattacgaggcgaagaagtatggtattgtaaccggggatccgttatggatggcccgacagaaatgcccggatattattttaacgccgccgcgctatgagcggtacattgagatgtcgcaggctgcacatgaaatctatggagaatatacggataaaatcgaaacattcgggctggatgagtgctggctggacgtgaccgcctcctcacgtctgtttggtgacggaaaagtaattgcagacgaaatccgaaataccattaaaacagagctgggattaacggccagtgtcggtgtttcctataataaaatattcgcaaagcttggcagcgacctgaaaaagccggatgcaaccacggtaatcggacaggattttaaagagaaaatctggcacttacctgccgatatgctgttgtatgtaggcagggccacgtatttaaaattactaaagtacgggatcaggaccatcggggatttggcctgcagcgatgtgcatttcctggaaagactgcttggaaagaacgggattatgctctgggcctttgcaaatggacttgatcagtcaccggtttcgcatgtccactcacgccgtattatcaagacaatcgggaacagtacgacggccccgcgggatttgaccggtgctgacgatgtaaaaataatattatacattcttgcagaaagcgtggcggaacgcatgaggaaagaaaatttttactgccggagcgttcaaatcagcatacgggacaattccctgttttcatacgaacggcagggcaggctgtctattcccacttgtacctcgcaggcaatatttgaaaaagcattcgaattgttccaaaagaatgcacctgagaatccggtaaggagcctgggggtgagggcctgcagtctgacacgcatggaataccggcagctctcatttttagaagatgtacaacgagaccaaaaacaggaaagtctggagcgctcaatcgatctgatacgccgtcaattcggccactatgcagtacagcggggaattatgctgacagatgccaaattgtcccgcctggatccggttgcggagcatacgatttatccggaagctttcctgaaaagccagagtttaagaacggaatcaggaggaatttgccatgtgcggaagatacagcctttatacggaggaacaggataaagaaatcatgcggattattaaatccctggacgaaaggtatccgggaaatgagatgaaaaagggcgagatttatccgaccaacacggcgccggttatctgccgtatggatggggagatcaggcctgagttaagtacctggggatttccccgttttggagcggcgaagggagtcataatcaatgccagatcggaatccgcaggagagcgtccatgtttcgcaaaagcctgcacggccgcagatgcgcggttcccagcaccggattctttgaatggacgcagcaaggtgaaaagataaaataccggtttaatctgcctgacagcagagttctttatatggccggaatatataatgaatttaaagatgagaaccggtttgttatcctaacgaccggtgccaatcattcgattgccgatgtgcataacaggatgccggtgatactcacggagcgaaacgtcgaggattggattacttcagaagattttgcattggcctatatccaaacggttatgcctgctcttcgccgggaattagcaggacagacagtcaaataaaacggcgctgaaacgcaaattaacgaagagggcagcgccgccatattataatataaataagcacaccgcaggtcgcaaagcatgacaagggaaaccggctatcgcagggatgatgtgttacaatacgcaaaacagtgggcaatgggcagaaaccccagatatctggattttgaacattatgggggagactgtacgaattttgcatcccaatgtatttatgccggaagcaaagtgatgaactatacgccggtaacagggtggtactataacagcagctcagacaggacggcaagctggacgggtgttacgtatttatataatttccttgtgggaaataaatcagtcgggccatatgccgttgtaacggatgaaacaggcgtgcagccgggagatattgttcagttgggcagtaaagaaaagggcttttatcacagccctgtaattgtagccgtaagagggggacgaatttatgtggcggcccatagctttgatgcatatatgaggccgcttgacacttacatctatgaaaaagcgcgtttccttcatatacagggggtacgtgactggcagcgataaatgtgctgctgccgcccggaagagttgtacaaaacacacattggcactgatgccgtgaaatactggtaattccgtgtttcatggcatttttttgttctgttatagagcgattgaatggaaatgggatgacgtatatgttacaattcaattatgcagtgttattgcagattatgaaaaaacacataaaaaacatatgaaagatataaggattacaaattgccttgatatactgtgcatgcagacaaaaatactgtaaaggagaattgcatatgagaaatttaaagaaacaaggctttttgtggatggcggtatttacactttgcaccgcttcggctgtgcccgcattagcagcgcctgcttcgccggaggcagtttctgcggtatgtaaagttaagacggtgaacatatcggcagatgaagcgggagaaggcggggagattcgagaaattacatttaaagacggaatgacagggagcatactggtcaacgaacttactgaaccttttaccattaatgcaggtaataacggagagtatattgtgagcatcagttacaaataatcccgacagacagaagctgcaaatccctgccgggatttgtggcttttcgccgcgtttagcgaaaaagcagatcagcaggaaggtggattaggtgagtaaaattctgataattgaagacgaacgggatatagaagaactcctccggttttttctggaggacagcggatatgaggttgccgttgccagggatgggttagaggggattacggcatttcaaaaagacagatacgatttaatcctgcttgatattatgctgcctaagatagacggatttgctgtctgcgaactgatacggaaagaatccatattcccgtaattatgataacggcgctgagcagtgaggaggagcaggtgagaggtctggatcttctggcagatgattatatcacaaaaccattttccatgccggttctcatcaggaaaattgcagctgtgcttcgccgaagcggagaggggcaaaagccggtgagaatcagaaactcatctaccgcgatctgtgtctggatttagataactatcagacctttgtcgatggtgagccggtagcgctgacgaaacgggaatttgaaatattgagggaacttctgaaccaccagggcaaggttatgaccagggaacttctgttggaaaagctgtggaaatatgagttttatgggaatgacagagtggttgacaaccatattaaaaatttgcgcaggaaactggagagagattatatagagaccgtgaaaggaattgggtaccgtattgataggatacatgagaagccatttgacagttaaaatatttctgataacaaccttattgtttctggctgtatcggcagttacctacggatttatcatcatgtatgtaccgaggtattatataatagaagcggaaaaaatgtcggttaattcagtacagaacgattcggagaagaatgatgcagagcataacatacagtacggcggcataagcaatgataaaatcatttcgttccggacagaggtcaattctccgtacacgttcgaaatcagggaaaatgccagagagttttccgcactctgcataaggtattcctgccgttacttgctgtcgcaatctgtaccgctttggttacttccctgttttactcaagatatatcacccgcccggtgctccgcatcaccgaagtgtctaaaaagctggcggcgctggatttcggtgttcagtgcagggaaaaaagaacggatgaaatcgggatgctggccggcaatctgaatgagctttccggacggctgtcggcggccctggacgaattgaaaatgcaaatgccatgcttttggaggatgtggcgagagaaaagagcttgagagcagcgcaaattgccgcagattacaacctgagagtaggagcgctagaagacaccgggtaccggattgaagttcgaaacgagaaggacaaaacgctgttcgacatcatcctgaacgctctggatatcacaatgatggggaccgaaagctgtttgtgctgtatgacgatgcgggggctttgaccttgaagaatattgagaacatgaaactgaacctgatgatctgcgacgagaccgcgcaagactatgattttaagtccagcatagacagccacacctacaatcaaatcgagttatatcgagatgacaacgagacaaaaaaacgggaactgtatgtggcaaaacacactgaaaatgtgaataagtggggtatccttcgatgcacgagtctatcagtgatagtgtaaacgggcaagaggcggcagaggcatatctctccctttacaacaagccatcaaggagcttaaaaataaaggatgccttcgggatatcagtgtgcgcgcggctgcctaatccctacttttttaaaggcaggggaccagaccttgaagaattacatgttggtggaggctgtgacacataaattcagtcaaggtttccactcgatggatttaacgttgaaaggggcgaattttaatggctgatgcagaatggattgagaatttgcggcaaatcgcggtaaaggccgtggaagccgggtatccttgcaatgtgattttgggaactgtcgtttcgtcgtcgccgctatcagtccgaatagaccaaaagacgacactgtcaggccagcaactactattaacccgggcggtcatggaccactcaagggaaatgagcataccggggtgggcacagtgacagtgactgtaaaagcgggcctaaagcctggagagccggtcatgctgctgcagaagcgcggtgggcagcagtacattgtgattgaccggcagtagagaggagaatgccatgttaccggattcaggtgatatattaaagcaagattttgaaatcgttgacaggccctctaaaacataccggtttcaggcggagcaaattacgggatatgcggatgggctggaggcagttaagcaggcggcgctctgcattttgaatacagaacgatatgactggcttatttacagttggaattatggagtagaattgaaagggctattcgggaagccaatggggcttgtgaaatcaaaattgaaaaagagaattaaagaggcattgatgcaggatgacaggatccagagcgtcgatgcttttcttttgagaccagggagaaagctggctgtttcattcacaatacatacaaagttcggagacattgaggtagcaaaggaggtgaaggtctgatgtttgaagatataacatatgagaaaattttgaaacggatgttagacgccttccggagacttttgataaacgggagggtccattttatatgatgccctggcgccggccgcggcggagatacagatcctgtatataagccttgataatgtgctccgagaagtatacggagatacggcggacagggaatacctggtgaagagagcggccgaatatggtattaccccctataaggcagtggcagccgaatggaggggcgatttactccggatgacattgagattgcggagggcgaacgattcagtcagggagcctgaactttatgtgtcagataagttggaggatggaggctatcgaatgatttgcgagacggaaggagcttctgggaatgacagcaacggtacaatggtgccgataaactatgtgcctggactggctaccgcacagttgacggagcttctcacgccgggtaacgatgaggaggaaacagaggccttccggaagcgctatctggccgccgtccgtaaaccatccaccagtggcaatgtctatgactattataactgggcgatggagtgcaatggagtgggagcggcgaaggtgtttcccctggctgatggtccgggacggtaaaggtagtcattgcggacgaggaccgcagtggagcaagcgctgcccttattaataaagtcaaggaacacattgaggggctgcgacccatcgggccaccgtggcggtggaatcagcaacagagaaagcaatcaacgtggcggccgacatacgcattaaagatggattgtacttgggaactatccaggattcctttagccgagcggtggatgaattcctacagcagaacgcatttgagatgacctatgtaagtctggccagaataggcagcttgttactgggcattcctggggttgaggacttttctgtgctgttgctgaacggtgaatcaaaaaatgtagagttaaagaaagatgaaattgctgtggcgggacggtaagtctggagtgatgtagtggagattaccagatttgaggagaagttaaataaggtcgatggaaatatatacgtcattgaagaaaaggtgcagttaagtgatggcgtttataacggcgaactaaagcatgacaacatcaatccgacaacactggcgatatacacaggccccaggctcacgggggataggatccaaaccttttcgttgtcaacgcccagcctgactccctggaagagaatcattaaaatatttgctgatgtggtggaagtgtatatcagttatgaaactgatggagacacggtagaggccgaagatataaatcggctgcagaggccacggtaaaaactcagagcgcagtcaactcagaatatgagcgtgctgcccgaacagagagagaactgggggagtcactcgatgctgaaacacagcgggcgaaagacacagaggcagagctgggaaacaggctaaacgaggaaagtagtcgcgcccaaggagaagaacgagcactgcgcagtgatttactcagcgagagcgagcgggcaacaaatgcggagaacatcctgttaaagaaaatatcagaagagacggagagggcgaaggcatctgaggccgttctctctcagaatctacaaaccgagattgagcggtctgaagcggcggagcagacacttgcaactgaaattactgaggagacgagacgagccgggctgcggagaaggtcttaaccgacaatcttacggccgaagtgaaccgcgcaaaggcagcagaaaaagtgaatgaggatgcattatcagctgaaaccactagggcgaaagatgcagaaaagaaactcacagataacttggcctctgaagtcgccagagcgaagctgctgaaaagggaaacagtgatgctattacggcagaaaacaccagagctgctacggcagaacaggtgttgagtacagacctgtctgcccacaaagggaatgtatcaaatccacataaagtgacaaaggcacaagtgggactcgggaatgtgacaaatgaatcaaagaccactatgttcaccagcccagtattcacaggcacacccacggccccttcggcagccgcagaaacaaatacccaccagatagcaacaacaaaatttgtccaggaggcaatcagccggggaattgcagcgtcggatgcaatgatttttaaggggactttggaacaggaggaaccataacagccctgccgacgacgtatcttaccggttggacttatcgggtactcattgccggcacgtatgctgggcagcgttgcgaacccggggacttggtagcggcgttggcggatcgtaacggcagcggaaatctggactcggactggaccgtggctcaggctaatattgatggagccgtgctgtccacgcggaaggtaaacgccgggaacggattgaccgggggtggcgatttatcgacggatcgcacgatacacgtcggggccgggaatggtgttacggtaggcgctgatgcagtagctgtgaagccaaacacggccggtacagccggggcagtcggaaaaacagtggtcgacgccaacggcgtgggagtcgctttgggaaactcatccaccaccgccttcgaggtgatcaggggaaaacagcatacgatcacagtcaggcagcacacgccagaaccgacgcaacgaaaacagaagcctccgcaacaaatgggaacataaagataaacggaacagagacgaaggtgtacacgcatccggcgggactaatccacatgggacaacaaaggctgatgtaggcctcggaaatgtgtccaatgtcgcaaccaatgatcagaccgtcacctacaccctggccgcctccctttccctcctgtccagcggagaaaagctgtcagtggcatttgggaaattggcaaagtcggttgctgaccttatcgctcatcttgctgacgccgtaaaacatattaccgccgaggagcggaccaaatggaatgccgtgaccaacaaggttgataaggtgtcaggtaaacagctctcaaccaacgatttataccacggcggagaagaacaagctggcaggaatcgccgcaggggcggaggtcaacgttcaggcagactggaaagtgacagacacagcgtcggatgcctacatcaaaaataaacctacgtctatgcctgcgtcggacgtcgccgcctgggcgaaatctgcggctaaaccatcctatggatggacagaaataaccggcaagccagcaacctttgtgccgtcatcacacacgcataccaagtcgcagatctcagacatgcctacaaagctgtctcagtttactaatgataccggatatctgaaggaaagtgacattgacaccagtcagaaccacacgcatgctaataaatctatcttagacaaaattacgcaggcactgtttgataactggaacgctgctttttcccacgtgagtagtaaaagtaatccgcatggagtgacagctgcgcaggttggcgccgcagcctcgtctcatagtcataccaacctgtcagcaatagatatcaccggacagacagttgatgcaaacagttacaatttatcgtctggaagtccgcaaatacagttctattccgagaagacgagcggcggagcggccaatattacgaacattcctgtttccggacagccgtttttattaaaggtagaattgttacggtggtcatatgcaacagactacataacaaagcagacatttttatctgcgacagctaaaacgacttatgaaagatattgcacaaatggaacatggggatcctggcttccgattgctgttttcaatgccacgcctgtttctggccgagttcttgtttcagacgggacagtcggagggatcaagtcatccgcgtatacgattgcatcatcggtgccgtcgggagccaagtttaccgacaccgtatatgcgcatccgaacagcggagcggtggccggaacctaccggagcgtaaccgtaaatgctcaaggacatgtgacggccggaacgaatcccacaacgctggccgatatgggattaccgatgcggcagcgaaaaatcacaaccatgacggggcatacatgccgaaggggccgttctcctgggcccagatgcacggagcatacacctggaaccagcttaagggggtgtaaatatgtatggagttgaaaaatacggtaagttaaagtatgccctggaagaattagagccggaaatacaggaggaatattttacagatttgtcgctttatgttccctcttttatttcctcaataagagaaatgaaagaaatataccagacccagggaaggaaatgggactgcttcgatactatttgtacgaccttctggcccagtgctttgtttccacttctgcctggggaattacgaggtgggaggaactgctgggaattacgactaatttaaagttatcttatgagcagcggcgtgaaatcgtactggctaaaataaggggccagggaacgacaacaagacagatgatcaaaagcaccgcagagtcattcagcgggggtgatgtcgatgtggcagaagataatgagaaccaccgctttattgttcggtttataggaattaaaggaatacccaggaatatgcaggcgtttgtcgccatgctggaagatattaagcctgcacacctggaatacaggtttgaatacacctatacgacatggaacagtttgaaaattttcacctggaatgagcttctgccgaaaacctgggatgaaatcaggattatgcgagaagtggagtatgagaacgatgattggaagagtctggggctttatacctgggacatgatttactggaaaacctgggaagaaattaaataggaggtaatttatgcagtacacaacaaattataatttaaaaaaaccggaaggatccgatccggtaaacattcaggactttaatgataatgcggacagtctggatacagaactgaagaaaagagtaatagcagcaggggagacatctctaacacgaaaatcgtgacagcggacagtatcgcaacagaatttcctgtccctgcagcaggagatacgccaaaaacattcctcggaaagatgaaaaagtttgttgaggactttaaaaatataaaaacagggcttttaaccgttggaatgctggttaataactgcgtgacgaacaatgcaaatttgcctttaagtgccgctcaggggaaagttttgatggatctgtatactcagttaaatggcgaaataggcacgcttaaatcagtatcaggtaccaccgttattggcaatggaaccagagaggaactagaggctacatctctcactttagagcctggagtatggataatcacgtgttacagtgaattttttgaaggaactattcctacaaattcaatttataatacaactttacgcagtaactctaatggtcgaataatgactgttcgcagcactacaacaaacggtggggtattaatgtcatacacgtagcaaagattaatgctgcagatacatttaaaataacctcctttgattacgatttcggaggcagtgtaaaattaaatataaatatgtatgccgtcagaatcaaataacaagtaaatggcgagagttttattgtcagggatggaatacgcgggaatgatgaccttaacaacattgttgtcccggggtattatcaacttagctcatcggcctccaatagtgtcgccaatccggctttcagaagtacatctattgttgaagtaatcacaacagactcgtacattgttcaaagacaaaccgggccaagtgaatctaagtatcgtttcagggattctaatagtaattgggggcctggttataattcaaattaaatggcgagttgtgttaccgtttcacgtcaaacgtgtccgaaagcccgatggatacctttaaaaaaaattggtcagctttgcctgaacttaaaacttctattggtgcagtggcaaatataaattttgccgcaggtttcattgtttataaacactctgccaattatggtgcagtatatatgttttcgtacagtgacgcttatccagttccgatgtttgctagacttgtaaacggcacatggattagtccataaatcgtaatcccgccgaatccaaaatagtaatttagctgagaaaatcttacaaaaatcagggcgaaagaacctcttttttgatattgtagagatatcaggaaggaggtttttgagtgttagaggaaatgttgatgaatgttgtccaggcgatgagtaactgtctggacgaagaacagttggataagcttcaaaatgtgctttatatccagttccacgataaaaaaattgtggaagaaaaaaacgagctgcaggcaactggaacggatagcgatactgctaaaatcaggttgtttgttgccagtaaaaaagtatccggccggcagaacaatacactggcccagtatgtaagggaaataagcaactgccgaaacgccttgaataaaaatatcgaggacattacaacgatggatttgaggtggtacttcggaatgttgagagaacataacaatatcagtatggtaacgctgcaggggaggatgcgataccttaacagtttctggacattcctgcaaaaagaaaacatggtatcggaaaatccgattgccagaatagaaagtttacgtattgaaagtactataaaacaagccttttcggcaaaagaaatagaggcattgagactgtcatgtacccgcagccgggatagggcgttgattgaatttttatatgcaactggtgtcagggtgagtgagctttgtagcttaaaggtaggcgatattgatttatataaacaggagtttaaagtcatgggtaaaggaagaaaagagaggcatttgtatgtgtcggatgtggcgtgctttcatcttttccgatattttaaggaccgtatgcaaagagaaggattaacagttgatgaactggccgaaaggcccttgtttgcggccgtgaaaaagccgtatacaggtataacagtggctggagtgcagtatctggtaaagcagttggggaaaaaggcaggagtcggcaatgtgcatccacaccggttccgtcggacctttgcgaccgacttgctgaatcgcggaatgcgaatcgaagaagtaatggtcttgatggggcataccaaaatagagacgacattgatttactgtaatatcaaacaggataatgtccgggaatcttaccgtaaatatgctgcctaagggtgatggaaagcatttttttagtcagccgagagggtggcttatttggcataccaaaaaacaggataggtgacataatattttatggggttggggatatgagatgaaaaacaggtaaatttgcgtaaggttttggcagttaaattactattttgaaatattatttcgagttctgctgtcctgttacaacgtacgccaaccagttgggtaagccctatatgcaagttcggatgtatccatatttgaagcaaacgtaacataataatttgagaccacatagctgattattagtattctaagagcagtccatcctaaaggcttgtttttggtgttgttgtcagttatgccgcaagatagccctggggcaggaaattaatatcagaaatggtgttttctctagcgatagtttcaatctcgccattttatggttgacgaataaataaaacatttataaaaatcgcatcgctgtaactggtgccgcttaagttatctacatatattgttactgccgaattagatgatatccagcaagctcgtgggagaactttagcttgtcttgtatcggtgatgactgctaaaacaggtttatatccatcaggagtgtttatcggtatggttgccataccgctgttgccactcggaaccgtaagggtattactaaattggacagttttgatataggttttcatttcgccattttgtattgttattttcgtggcgggattacacttttcaaatgcaaaaaccgctaaatttcaacccatccacccggacttaccctaactgcaaattttccattaatggcttctccggcaaattggattttgtaatttgatacaacaaaactgacaataataattctggtagctgtccatcccaatggtttgttctgggtgctgtcatttgttatataccaattagcacatccgggatagtgtcgatgtcgattacctcatttccatattttagcgggtatcctcccatagacaacatctcgccattttacagtgtggcagagcctgtaaaatagcgccatccggtccacttgttagcggtatttgaaatccaggagttaacggcaattttgctgttttctcggctgaaaataacaattgataaagtatcaaaagaactaaggacaaagccagagctatacctaaactcgccaggaatgtcccctccttgtactacggttagaaaatggattccattactaccaataaaatttttggctgtatcaagaatagaaccgttttcgggtacacgtatagcccctttaatcatagaactggccaactcgccattttattcattgtttgtcagtcgcgcataacgcaattcattagtgtttatgttatatacatataggacgtcgggatatttttcatcataccgcaaactaaaaggggtatagccagactggaaggaaacttttccttgcatctcgccatttaagcaagggaaaaagccctccatcctgaccaaacatttgataaataacgggcgcgaacatgcaaagaagtcatgtcattggtaaaataaatttgtgcgcaaacatactgcgtcctaagtacaaatagtagccctgttatattgacgggatagtttttacaaccggaggtatccggagttgatccatctgagtaaatacctgtcttttcaatagtattaaaatcaaggccaataaaagacctgtatgtcgaaaagttatcgccattttgcattgttttttcggattcatcgattatatatagcgatataacaaaaccaccaattttcagatggtttcagcctgtttgtagcgattttgaatccggaagatgtcgcccctgtgattactaacccatctacatatgtaagagtaattgtagtgtcttcccacatagcaaatacttttggcgctccgcgcataggttctggaaaattaacggtaatttcctgcgtgccggtattggccggtggaaatctatctactccagttattatgtcgccatttaaacatgaaaattaggtcctttgggacctttttatatataaaaaatagaaaggaaatgaaagtatggaaaaattaagaattggaatgaatgaaaaggagtatctctatagcagcattcttccggagtcggccacagtgctacggattatctttgagagtgcagtaccggagagctggggagatctcactctcattacaacgggaggcgtggaagctgatacattgacgggatacaatacagtttatcgacaggagggcagacagtatggttatccaatgacggcagcgtttatcaagagcctgtcccgatgccggaaccagagccttacgatccgcctttgtcggatttacaggcggctaaaaagtcagaggtggcggccgactgtgaacggcttatctactccggcgtcaatgtcaccctggcagacggcagcacagagcgttacgccctgaccatcgaggatcagcttaacctctttggtaaacagtcccagctggcagccggggccgcgcagctggagtatcatgcggacggtaagccctgccggtattacagcgcagcggacatgcaggctatcatacaggcggccatgcagcacgtatcctatcacaccacctactgcaatgccataaacatgtggatcgccggttgcgagacggctcaggagctgcaggcagtgttttacggcgcagatgtgccagagcagtatcagtctgacgtactcacggcgtatctgcggcagatggctgccgttgtgggaggtggtgcggatgcttcggaccctgtataaacacctggcactggtcgaaatcggaggattgatttacatttccctggaacttgcctggcgcggccggagtcattggactatgtttattctggaggtctgtgttttttatgtctgggacttattaatgaggtactgccctggcagatgccactatggaagcagatagttataggggcctgtttgattacagcgttagagtttatgacaggatgtattgtaaatctttgtctgggctgggccgtgtgggactacagcagactgccgggtaatgtcctggggcagatatgtccacaatattgcctgctgtggctgccggtgagtctggcagggattgtcttggatgattggctgcggttctggtggtgggagaggaacggccgcactataaaataatttgataaggaggtaggtgaatgtgacagacgaagaaattgcagtaaaactggaagggcatgatcacgaaattggttcgcttaaacaccggatggctgaccaggaagagcagagcaagacaatccaggagcttgtcctgtccgtccgggaattggcgttgaatatgcaggcgatgataaaggagcagagcgcccaaggagagcgcttggcaaagctggaagcagagccggcggaacattggagcagtatgaagcggacgatatttaacacgatggtaggagccggggccggagcagtggcgaccggacttatctatattatggcacagtatatcagataagaaagcgaggaataattatggattttggaattgcaagtgtagcaggaattacagcactgtgttatctggccgctatggccgtcaaggcgacatcggtagacaacaagtggctgccagttatttgcggcgtaattggggccgctctgggtgttgtaggcatgtatacgatgcccgattacccggcaacagatatcatcaatgcggcagcggtaggcgttgtatcagggcttgcggctactggtattaatcagatgtacaagcagcttaagggcaacagcagtacatagacctggagcttccgggcctttttgattggaggttaaaatgcagatacatcaattactcacgccttataattacaaccccggccagttaagccgcattaaatacattgtcatccattacgtgggggctaccggcggggcggaggccaactgccggtattatgccagtcagcgcatcggggccagcgcccactactttgtgggctttgagggagagatatggcagtcgtagaggataagaatattgcctggcattgtggcgcgaagtcgtacaagcacccggagtgccggaacacaaacagtattggaatcgaactttgcgtgcggaataaggggagccaggcagacaccagccgtgactggtactttgaggacgcgacagtggaggcagcgattgccctgacaaaagaactgatggctaagtacggcgtcacggcggaccatgttatccggcattacgacgtgacaggtaagatatgccccaacccatatgtttataatcacacgaaacatacctgggatgcatttaaggcggcgttgtctgggcctgagaaggcagttggagactgggaacacgatacccagggaaaataccgttaccgtaagtctgacggccgatatgccacgaatgagtggcagcttatcaatcatcactggtaccttttcggtaaggacggctacatgctgaccagttggcagcgctggaacggcagcagcgtcatcggctggatgaaccgggagactggtatttcctcgacaatacggtggatgggccgttggaggggcatgctggcacgagcgggccggagggtttggcggtttggagatatggtatatagcatagaataaattaaaaaggaatgcagtagacgattcagtctattgcattctaaaataaaaaatcttatatatggcgatagataatccacattacaaaatcggctattaaaaaaagaatcacgaatatattaaatagaatacgtacggaattctcattcgaattttttttatgctactacatctatgcttttgaagcgtgcaggaacaacaatcggctttacatcctaaaaaaagctccttcccgattatttttccaataaggtatagcatcacaacgatagagttaaaaagacaaattgcacacaccaataaaataaaaacaagttttaaaataaaagtgtttgaagctgcagtaacagcactgccaataaatgttaggcttcctgaaaatgcaataacaattgctgcaaatatgcttaaaacagaaattagctcggtctgtatagactcagccttgttttggactgcttttgcagtggctattgcctcctctaactttgcagtgcttttttctacgttcaatgacacattttcgattttttgatccatcataagcatagctttttctttgttagaataatataaaactctacttatttccaagtttaaatgatcacatagcttagcaaattttttatgtatattactaagctcgctgtcatcgatatctttacactcttcaacatatgatcttagcgtttccagattcgaagaaagatagtctaagttatactttgtatcttctttattcatatttaaaatcagtggaaagaaatccgaataattatgacgaaaatcagcagagtagatttctttaaatatagaagttactccgctgacttcctcctcatttaacaacttttccgacaacttataaagctgtttttcaagtctatcttgtattttttcacgttctacggaaagcatgattacctctgtgattcacatttattaattaaagaaaatggaattacatccctatttccaatcccatttttgtaaatagtatccaagctcctcctgttatatgcgtttggttaaccaacacactggctggaatatcaacatatttatcgatgatttggtctaagatatatgaatcaaaatctctaatatcagtaccatctattagaaatctaattggcctgccaccgtatgagcaatattcattatacacttccggaactacagggcctaatggccatgcgcaaataggttcatagaagaggtgccgtgaagttttcttataaaagtcaacccatgcataatataacattttttgcagttttaagttactaataggttttccacgttgatatgctcttgaaataatataatccgcaacatcaatagctctatacgacattcgctcacctccctaacgacaaatttatattattagtatatgacattttgcacaaatttacaattgacattttagctatttgtgtattgattttttgagtaattttttattttagtacttttgcatagtattatatttaataaatgtggtagacataccgaaatggaatagatataaaatatagtagataaataattaataatataaaaatagtcacaaaatcaccaccttatccgtttgttggaaatagggggcaaaaaaacaagcctgcgctatcattaaatatgggcgacgccgggagacaagctctccgctggcctcgccctgcatatcctactctccaggcccggaccctcaactgggcctctttattttttaactcttcagcaattttcttaagctcttcgcgtatttcttcccggctatatttcggccttttgcagggcaattttcccgttttgcaaaaatggataatgtggcagactaagccagttgtaatacgagcaacaacggaccagtaataaatgagattgtttttaatccgattctttttcattcagtatccccttccttttgtaatttattgtactactttggtgcagtgataaagctggtaaaaactgggaataatatggcttattatactgaatataatcagtatattcaacccctatgccgcaaagtatagtaaaggcaagagaggtggaagaatgataagttataagccgttgtgggataaaatggaaaagagaatgttacaacgtataagctcattaaagagggattgacaagaagacaattcacaatttgaaaaataatgcgaacattacaatgcttacggctgaaaagctttgcagaatattgaaatgcgagataggggatattgtagaatttatagatgataatggcggcaaggagtgatccggccgccttatttcgtgtgatatttcgtgtgatactttatgctttcgtgtgatattttcgtacctaaatcggtataactctactaagattaaaacaatgaaaaaccgcgtaaatacaaggtttcttgcaaatacgcggcttctcttttcaatggagacaacaggactcgaacctgcgaccctctacacgtcaagcagatgctctcccagctgagctatgtctccatagaatgattataaacgataggaatggatttggcaagataatactgaattcagatcaatctgcattccacggtataaaatccagatattatcagataataagcctatcaatctgcaaggagcggctaaatatggagcagccaatcatccttcattccgacatgaataatttttatgcttcagtagagtgcctggacaatccgggcctgcgcggaaagccggtagccgttgccggagatcaggaggcgcggcacggtatagtgctggctaagaattacgaggcgaagaagtatggtattgtaaccggggatccgttatggatggcccgacagaaatgcccggatattattttaacgccgccgcgctatgagcggtacattgagatgtcgcaggctgcacatgaaatctatggagaatatacggataaaatcgaaacattcgggctggatgagtgctggctggacgtgaccgcctcctcacgtctgtttggtgacggaaaagtaattgcagacgaaatccgaaataccattaaaacagagctgggattaacggccagtgtcgtgtttcctataataaaatattcgcaaagcttgcagcgacctgaaaaagccggatgcaaccacggtaatcggacaggattttaaagagaaaatctggcacttacctgccgatatgctgttgtatgtaggcagggccacgtatttaaaattactaaagtacgggatcaggaccatcggggatttggcctgcagcgatgtgcatttcctggaaagactgcttggaaagaacgggattatgctctgggcctttgcaaatggacttgatcagtcaccggtttcgcatgtccactcacgccgtattatcaagacaatcggaacagtacgacggcccgcgggatttgaccggtgctgacgatgtaaaaataatattatacattctgcagaaagcgtggcggaacgcatgaggaaagaaaatttttactgccggagcgttcaaatcagcatacgggacaattccctgttttcatacgaacggcagggcaggctgtctattcccacttgtacctcgcaggcaatatttgaaaaagcattcgaattgttccaaaagaatgcacctgagaatccggtaaggagcctgggggtgagggcctgcagtctgacacgcatggaataccggcagctctcattttagaagatgtacaacgagaccaaaaacaggaaagtctggagcgctcaatcgatctgatacgccgtcaattcggccactatgcagtacagcggggaattatgctgacagatgccaaattgtcccgcctggatccggttgcggagcatacgatttatccggaagctttcctgaaaagccagagttaagaacggaatcaggaggaatttgccatgtgcggaagatacagcctttatacggaggaacaggataaagaaatcatgcggattattaaatccctggacgaaaggtatccgggaaatgagatgaaaaagggcgagatttatccgaccaacacggcgccggttatctgccgtatggatgggagatcaggcctgagttaagtacctgggatttccccgttttggagcggcgaagggagtcataatcaatgccagatcggaatcgcaggagagcgtcccatgttcgcaaaagcctgcacgccgcagatgcgcggttccagcaccggattctttgaatggacgcagcaaggtgaaaagataaaataccggtttaatctgcctgacagcagagttctttatatgccggaatatataatgaatttaaagatgagaaccggtttgttatcctaacgaccggtgccaatcattcgattgccgatgtgcataacaggatgccggtgatactcacggagcgaaacgtcgagattggattacttcagaagattttgcattggcctatatccaaacggttatgcctgctcttcgccgggaattagcaggacagacagtcaaataaaacggcgctgaaacgcaaattaacgaagagggcagcgccgccatattataatataaataagcacaccgcaggtcgcaaagcatgacaagggaaaccggctatcgcagggatgatgtgttacaatacgcaaaacagtgggcaatggcagaaaccccagatatctggatttgaacattatggggagactgtacgaattttgcatcccaatgtatttatgccggaagcaaagtgatgaactatacgccggaacagggggtactataacagcagctcagacaggcggcaagctggacgggtgttacgtatttatataatttcttgtgggaaataaatcagtcgggccatatgccgttgtaacggatgaaacaggcgtgcagccgggagatattgttcagttgggcagtaaagaaaagggcttttatcacagccctgtaattgtagccgtaagagggggacgaatttatgtggcggccatagctttgatgcatatatgaggcgcttgacacttacatctatgaaaaagcgcgtttccttcatatacagggggtacgtgactggcagcgataaatgtgctgctgccgcccggaagagttgtacaaaacacacattggcactgatgccgtgaaatactggtaattccgtgtttcatggcattttttgttctgttatagagcgattgaatggaaatgggatgacgtatatgttacaattcaattatgcagtgttattgcagattatgaaaaaacacataaaaaacatatgaaagatataaggattacaaattgccttgatatactgtgcatgcagacaaaaatactgtaaaggagaattgcatatgagaaatttaaagaaacaaggctttttgtggatggcggtatttacactttgcaccgcttcggctgtgcccgcattagcagcgcctgcttcgccggaggcagtttctgcggtatgtaaagttaagacggtgaacatatcggcagatgaagcgggagaaggcggggagattcgagaaattacatttaaagacggaatgacagggagcatactggtcaacgaacttactgaaccttttaccattaatgcaggtaataacggagagtatattgtgagcatcagttacaaataatcccgacagacagaagctgcaaatccctgccgggatttgtggcttttcgccgcgtttagcgaaaaagcagatcagcaggaaggtggattaggtgagtaaaattctgataattgaagacgaacgggatatagaagaactcctccggttttttctggaggacagcggatatgaggttgccgttgccagggatgggttagaggggattacggcatttcaaaaagacagatacgatttaatcctgcttgatattatgctgcctaagatagacggatttgctgtctgcgaactgatacggaaagaatccaatattcccgtaattatgataacggcgctgagcagtgaggaggagcaggtgagaggtctggatcttctggcagatgattatatcacaaaccattttccatgccggttctcatcaggaaaattgcagctgtgcttcgccgaagcgggagaggggcaaaagccggtgagaatcagaaactcatctaccgcgatctgtgtctggatttagataactatcagacctttgtcgatggtgagccggtagcgctgacgaaacggatcaatccgcctgtccggtttttgtttggctatccagactgtagaatatcggtccgctgggtcccagcggaattttaaacaatacaaacacaattaaaatgacgctccacgcaattccatgaccagtgaatagggcagcatatttgaaaacagggttccccatcccgccttcttatcgtatttctgcacgtacgataaaagaatcatcacatatgggaacagaggagaaagcacgtttgtaattgagtctccgattcggtatgacatctgcgttacagagggatggaggcccagaatcatgaacatcggaacgaaaatcggagccatgattgcccattttgccgatgcactgcctatgaacaggttgataatccccgaaacaataatcagtccgataattaagccgatacccgtgatgcccgtattctcaagaaactcggcgcctttaacggcaaatacggtagccagattgctctgtgaaaaccaggaggtaaactgtgccgagacaaatacaagcacaatataaccgcccatatccttcatcgcagctatcagcatattgacaatatccttactgctttttatcgtgcctgccactctgccgtacacaacagccggaacaaagaacatgatggttacaatactgataatccccttcataagcggtgaattattgctcataatcgcccctgtttccggatccgccaggaatgcatccggtccgatgcaaagagccacgattgccagacagattgcgataaaacagacacctgcccattttattccctttttctcctccggcgcaagattggcatcatgctccaggcggacatcgcctttatattcccctaatcgtggctctacaattttatcagttgtgattacgcctgtaaataataaaataaaggtagagacaatgaggaaataatagttcattgcaaatatgccgctgaatcccggatcgatactctgggcggccgatatggtaaacgttccggccagaacatcgctcatggagatcagaagattagccgccatacccgtcgatacggacgcatatgccgcaaaaatacccacagagggtttctcccacggaaagaaacagcagggccgcaagtggcggcaggacaatccatccggcatctccggcctggtttgccatgatgcctgcaaacacgacaataacggttacggttctgccgctggccctggcgcccgccagccggaccatcgaggtaagccagccgcttttttctgcaaggccgcagcccagcattatagtcagcacggctcccagtggtgcaaatcccaggaaattacttgggaagttgattaatattttttggagatttgcgattgttagcaggttaaccgcggtaatcgtctcccccgtaccgggatggaccacgctggctccggcagtaaaaaacgaaataattaacagaagaacgcagagaaatgcaaacagtacaaccggatcaggcagcctgtttcctgccttttctattttgcaaggatcctgatatacattggttccctgtctttctcactctttattcctgcattttcattcatgatgttccctctcattattaaatgacgcttatccgttttctattcgaagtacggccttaccccttcagccgttttcattcacattccttcgaaaaaatccggaacccttctcttattccatccatatcaaaaccggacatcagcataagaatcagaagcagtcttgcttttcttccgtccagaaagccggaactgataagccctttggaaagcagagacgtctccgaacctgggtagcctgcataagttccggtgagcatgtcccccggccgattctggatgccagaactaccggcattttatccgcaagctgtttcagtgtctccaccagctccgatggcgtgtggcctcctcccatcgcttccagaaccaggccgtctattttgcagtctagcgcacactttagcagtttcccgtcatctccgacaggaacggcgtaaattggaacggatacaggctgatccggtcttttcccatccacattccacttatttattgcaagtccggggattcttctttgcagcggcttcatacggatgcttggctttccttccgccagatacccgagaggtccgcattctgccgcaaaagcctcggtactctgtggatgaatttttctcacatataaagccgggtaaattgcatcattaaaaactaccatcacgccgagttctctgcaccggctgcaggagacggtccggattgccgccagaagattggccggcccgtctgctcccctcatgtcgggatttcgcattgcgcctgtcacggccaccggtttttctgaatccagcagctctccaagcaaaggctgtctcctcgattgtgtccgtcccctggaccaccaccacgccctctgtctcccctctaacaaggactggatttcggccgctaacccggtgatatcgcttatcaccatcgaagaacttgatttttgcctgaacgccttcaccgtaatatcggcttcttttttcacctcatcaagtgaatctataaaacctgtcagatcccctatttgaggaaccccgtttttccatgtataggcaatcgtcctcccaaagtcaaaactgatatttttcaacacattcctctcctttactgtcactgagtatttattttgccgtccgctctccgtataatgcgctgcgctgcgtatccgcaatctgatagttaagctgcatttcctgcgctgtttcacccggctttcgtggttagaaacgtccctcccgcccccccgtgatccataattctttttccgccggcaaagctcattgccgcgtcaagacgtttcatatccaataccgttatatcggcatctgctccgattcccagatttcctttttggtgcagcccgaacgtctccgccggattgaccgagcatttttccacaatctctttcagtgacaaatatccaagccggtaaaacgggagtaatttctgtaccagtccgtttctgggaatcctccgccatctgtcgccgccagctcgattaagggggagctgccaggtatcctgcgctctgtcaggcaagccgacgcaaccggggccagattggcgggaaagctcacatttatgttggtgtcgcggccggaccagtattggaatgcatcctctttatttaatagtacgttttcctctttcagggatgcaattgcacaaacggttccgtccttcatcgctttcgccagtcctgcctgggtaggctcgtaaccaaacatcttcaggcaattgacggtgatagcgtcgcagggtattccattcctgcatgcaccgctggttccgttgtttacagccatgtgggaatccgaaataatattcggattttctctgagcatctgaaatgcgtctctcaattcttccaggtaatgataccggtttccacggcagtaggcattaatgtgggccatcagaagcctctgtccccgcgcaaattcaaccgcttcctgtaagccgtatatatcgcttctctgctgcgtactccctgcatggcaggctatcattacttttttagcatttgcttcctccacacacagcctggaagactccggggtaagaggataatggccgccgaggattttaagtcccagagagccgtttttcagggattgctccagaaaccttctgacctgcgttctggagggcgactgtccaacctctccgggaagcactgcgtcgatacagccaacgttcattccgcatccgtgtgatgaaatctgggatgagatatcggtcacaggccccgcgtaatcaataatcgtcgtcactccggttttggccgccatataatacccgactctgccgcccagcagctttgtcacatgcacatgcatgtcgatgacccccggaatcaccgtcaggccggaaacatcgtatgtctcttcaccatgcggcagttctttttccagttccgctatcctgccttctcttatccctatatcaagacgctcatccacatggtgaaccgggtcaaatacacggccgccttttaatacaacgtcaaatctcatctgttcctccgttcataccgtcccgcagcgcgctttgcaaggacaggctctttcgcttctatactgaaactttctttttccatccgttctcatgagggatgtgtttattataacgattttccggcaggatataaaatgtcataaatacattcatataagttagaaaccgctgtttatacctgatttctgtttatgcccttactccagggcagaacgataacctgcacgctccgcgcacaggttaccgccatcaatgaaaataccctggcggcaatttaattctgccaccagggtataagtacattttaatattcattcagaggacaatattttatcgtttggggactctgcatctaagcttcgcaggtgtctttaagattcaatctccaagacaatttccgccgtaccaacggctccggctttttcgttgagtatctccataaattcttcacctgtaatcgtctctttttccaggagataatcggccagttcgtgagttttttctcatttcccatcaagattgatttgccttctcataggcatctttgaccatctctattacttcattgtcaattcttgatgcagtttccgcagacacaggccagcgaagcatctcgcccagatacgcattattcaccgtctccagagctaccatgcgaactgttcgctcataccataccgtgtgaccatggctcttgctatctttgttgcctgttcgatatcattggatgcgccggtcgtaatggaatgaaagatcaactcctccgctgcccggccgcctgtcagtgtcacaatcttattaaacgcctcgtctttgctcatcaaaaatctctgatctgcctctacctgcattgtatatccgagcgcacccgatgttctcggtataattgtaattttatgaaccggagctgaatggctctgtaaagccgctactaaggcatgaccaacttcatggtaggatacaatcttttttctcatccgttgagacgccggcgtcttttctctgatatcctgcaattaccgtctccacactttcttccagatcggcctgcgatacggtcttccttcccatcctgaccgccctcagggccgcctcattaataatattggcaagctccgctccgctggcaccgctggtgccctggcgattgcattgaaatctactgtttcgtcaattttcacctgctttgagtgtaccttaagaattgcctccctgcccttcaaatcaggaagctcggccgggattcttctgtcaaagcgacccggtctaaggagcgccttatccaatgattcgggacggttggttgcggccagaataacaacacccttccgtccgtcaaatccatccatctctgtaagaagctggtttaatgtctgttccgctcatcattgcctcccatgcctgcaccgtcacgcttcttaccaattgtatcgatctcgtcaataaatacgatacagggtgctttttcattcgcctgcttgaagagatcgcggacttttgcagcgcccattccacaaacatttctacgaattccgatccggatattgagaaaaacggaacatgcgcttcaccgcaaccgcttttgcaaggagcgtcttaccggttcccggagggcctacaagcaaagctcctttcggaagtatagcgccaatctccgcatacttctggggattatgcaggaaatcgacaatttcctgcagcgcctccttggcctcgtcctggccggccacatcggcaaatgtcttgcctgtctccgattccgcgtaattttcgcattggactttccaaatgtcattgcgttgcctccgcccatccgtttcatcattgcacggctcatcagctggccaagtccaataaaaataatcagcgaagaatccaggtaaccagaaaattcagaagagggatgcctgggtcggaatctcagagctgtatttcactacgccggcatccgtaatccgctgctgcaaatcgtctcccggaaatgaacctgtcttatagttaattttccacttactgtctttcagagtgtatactatttcgccattcgtagttacataaacctcatctacatttttcttgttcagttcatctacaaactgatcgtatctgacctgctccgtccggtccatcagggacggaaaaataaaaatattaagcagcatcaatacagcatgaccagtccataataatataggaaagatttttaggtgctttattgccgtcgttgctctctttcatgttgttctcctcttatttgtatcattgttttatataataaccatatcaggcgctttttaaaattggcggagttttgtacgaatctccttcaattttttcatcgcactgatttattaaatatatacctcttatatttatatttgtcaatatttaatagtcaatatttatttaattttaataaatattgacttgtatttcgaaatatgctaggatgtgaacgtgggctaatcatctgattccctactaatatgcttgtaattaactttatattttatttggaggagttatttatggagaatatagaaaacagaataaattgtgaaagcggcggaaacccggacattaattccgtgggtgtacattttcttgaatttgccgttgctttccttactctggccaaatgccagtaccagcatgaaaatgacgtcaaagtaaattccctcccctttttcaccctggtggcacttgataattgggctgatgtggattataccatgtcggaacttgccgataaattacagataaccaagcagcagctttccaaaatgatcaatgttttagaggaaaaggaactggtggagcgcatccacgataaggaaaaccgtcggcgtgtttatattcgtatctgtgaccgcggccgtgcgatgatggacgatataaaaagggggatgcttgaatcaactctttacggactcagttcctatacggatgaagaactcagggagatggattactgcatacgaaagctgacggaattgatggagaaatttaatataggcaattgcgggatgcagatgaatagggcccggtagcggtaagttagtttatccggcgatttatatgcggcagatgcagattatgaactaaagtataatctgcatctgccgcattcttgtatattatgtaattcaaaatataattttcttcagctcttctttccattcattgtcggcttctataattttccttatccgaagtataatgacctcgtaatgcaattaggaatttcgaaaaatatttcaaaaagaaaaaaaaggagagtgcattaattatgagaaagcagactaaattagttgcagttttatctgcagcagctttactcgctatgggtgcttccatgacatctttcgccgctggttgggaaaaagatgacgctggtatctggcactattatgacagcgatgatgagatggtaaccgatgagtggaaaaaggatggtgcttactggttctatcttgacgaagacggcgaaatgctgacagacagctgggttgatgatgaatattacgtagacggtgacggacgtatgctcgtaaattcctggattaagactctggctgatgatgaggaagatgatccggatgacggtggtgagcattggtattacttcggaaacaaaggtaagaaagttactgatgattccaagaagatcaatggaaagacatactacttcaacgaagacggtgagatgttaacaggctggcaccaggatggcgatgacgctttctatttaggtggtgaagacgaaggctggagagctgagagccagtggttatggcttgagaaatccggactcgacgaagatgacttagatgatgatgacaacctggaagttgttctcggctgtacagaagatgacgactgcgatgacgaaggttggtattacttccagtcttccggtaaagtttataccggcgcaaacaagaaaaagattaatggaagatactatatgttcaacaatcatggccagatgctgtatgagtggattaacggtaccgcaaagactgtaagctcaaatgcgcagcttgatggtgtggcaagtgctggttccgcaagcgttgaggatatgagatactacaacgctgttgaagaaggctggagagcagacggctggtatgaaatggatggttctgaagacgtgggtacagatggtgatacagactggtactacgtagatgacggtgaaatcaaatacgctgatggcggttataaagacgaagcacttacgatgaagatggtaagatggtttacgttcagagaatcaaaatcaatggaaaatattttgcattcaatgaaaaaggccagatgcaggatggtttacagtatatcaacgctgacagcggcttctactacttcgacgagaatggctaccagaagacaggccgtgtaacaagtgtagagtgtgatgatgatgattacaccttctacttcaacactaagaacggtaagaatggtcagggctacaagggactgaaagatgactatctgtactttaacggtaagagactggatgctgatgatgattacagactctattactatgatggagacatctatctggtaaataaaaagggtaaagttcagaaatcttccaagaagtatgaccttgaaaacaagggaattgctgaggatgatgtagaagtaacaatcagtggcaagaaagttaccaagattaaaggttccaattttgagtatactgatgatgaattagttgctgaaatgattaacgaaatcaacggtaattatgaaaatgttactgacgatatgatcttatcagtaccgtttatccagctttacgatgatgacctttacacttataccgaaatcaagaaaaattcaaccccaacagaaggttggttaggacttaacaacccaaataaataaattttataacaattcaaaattctatgattaaaaatgggcggtggaaaatccaccgtccattttaaataaattattcagctgttaattcacctaaaaagtcaccatctgcagcagctctggttaatggtttttcagtccaatcaccatcatacagtgcaatatgcggccattcatatacaaacagagtaccatcgttgaatgctggtttcgtcagttctttatctgtataaagtccttcaaccgtatcaccgttaccgaattttacgtaaagatcatcgccattttcttcgatatcatatttcttggaagaggatttctgaatcttaccggatgcattcactaagtaatatttatcattaactctgtagattctgtaatcatcttctgcctcaagacgcttaccgttccaatacagatatcctgatttttcaccaatccagcctctgccgtttccgccattctttgtattgaagtagaatgtaaaggcgtcatcatcatcttcaacattggaaacttttcctgtcttcatataaccattatcgtcaaagaaatagaaaccgtcttttaacttctggagaccagtctgcatacgtccatactcatcaaagcagaagtacttattattgcttgctttaattttgattttttctctgaagattgctacgttatcaccatctttgtgatatagtcctcagcttttttagcttttccatctttgaagtagtaccagtctgtgtcattgtcggtattcgtatcctgagaaccgtcaatctcataccagccatcagctctccagccttcttctatctgattcatgtaaagcatatcacttggagatgcaccagcgttatttccatcaagtaccatgttaccattggaacctactgctaccttggaaccattaatccactcataaagcatttggccatgttcgttaaagaagtagaatctgccatttacttttttcttcttagcttctttgtacatcttgccgttgcttccgaagtagtaccagccctcttcatcacaaggatcattatcatcatcagtacagttaccgatctcatcgtcttctgatggtttttccagccataaccactgattctctgatctccagccttcgtcttctccacctaagtagtaaacgtcaccgttttcagactcataccagccatcttccatacggccttctccgtcaaagtaataggttctgccgttgatttttttggaatcgctggtaacttttttacctttgcttccaaaataataccagctgtcgccatcttcatccggatcgtcaacttcatcatcaacagtagtcttaatccaggaattgatcagcatagcaccgtcgttgccaacatagtattcatcgtcaacccaagcgtctgtcagcatttcaccgtcatcatccaggtaaaaccactttccgccatcctttttccattcgcttgttaccatctcatcatcgctgtcataatagtgccagataccagcgtcatctttttcccaaccagcggcgaaagatgtcatggaagcacccatagcgagtaaagctgctgcagataaaactgcaactaatttagtctgctttctcataattaatgcactctcctttttttcttttgaaatattttcgaaattctaattgcattacgaggtcattatacttcggataaggaaaagtaaggaaagatgtaattattgaaaaaaggtaatcgaaaacagaaattatataagacatttatatgaataattatttaaaagcaaacactcctgttgaatttggtttaaaatttaaacccttgacaaatatcataaattaacttatgataaaattactaaatcataaattagtaattttaatatatataaaggagaactatatgtttgttggaagacagcgtgaattaaataagctagagagtatgtactcaagcgctcaatttgaactggccgttttttacggaagaaggcgcgttgggaaaacaactctgattaatgaattttgtcgtaataaagagactatattttttgtcgcatctgaagcaactggccaggagaatctaaagcaattttccaaagccgttttccaaaccgtcaatccgaatgccccatctccatcattctcaagctatgatgagcttttgacgtatattgacggtatctgcatggaaagacgccttatactggtaattgatgaatatccatatcttgcatcaagttataaggctatctcgtcccttttgcaggcacatatagaccatagctggcaaaacagccagctcttcctaattctttgcggttcttctatgagttttatggaacatcaggttttaggataccagagccctctctatggacgaagaacagctcagtttaaaatccatcctttcaccttttttgagactagggcgatgtgtccttccttttcatcggaagaacaggcaatcctatatggaattacaggaggtataccggagtatatcagccgcatttcatccaaattgactttggacgaaaatattgtggagcttttttttacagaaagcggccgtctctacgaggaaccttccaaccttttaaaacaggaactccgtgatccgtccacatataattctgtcataggcgccattgccggcgtgccagtaaaatgaatgaaattgcaacaaaggctgggatagaaaccggcgctgcaagcaacctcttacaggcgctgattgaactggaatcgtccgaaaggaagttcccattacggaaaaggaatccagcggaaaacaatttatttattggaggatcagatgttccgtttttggtatcgctttgtgagtccgaatatcagcggaattgttcgggcatggaagcatcatctatgaaaaacaggtaaaacctcagttgaatcattatatggcctggtctttgaagagatatgtcggcagtatctttacctgcctcaaattatagccaaagctccgtttatttacagtaaatccggacgttggtggggaataatcctgtcgaaaaacgccaggaggaaatagatattgcagcaattgatgatgataatattcttctgggtgaatgtaaatggcagaacgcccggttgggtgtgatgtgttgaatgatttattagcacaaggctcactgttctatatggaaaagaaatggtattacatttttgctaaagattcatttacacaggattgtattgcgaaagcagcacagtccagacatatttttctaatttcattttgcgatatgattggaactatataaaaagattaatataaacgtgattttagaattgattcgtttcctaatatacagtatcattcagatactatcttgcaattaaccttaacgtaggtgatgttaaaaatttgtatcgctaggtaaatataaaaaaataagacgagatgtcgctaattcatctttttgatgattgagcggcatcatattgatatctgtgacgaagaaggttggagagcggatggctggtacgaaatcgacggttctgaagaccttgaaacaaacaacgatacagattggtattatttcaagaatggtgaagctaaaaaggcatcctattacgataaatctggacttactggtcctgagttaacagatgacggaaatactgtttacagagctaaaataaagtggaaggaaagtatttctgctttaatgaaaaaggccagatgcagatgggcttacagtttattccggcccagatgcattctgttacttcgatgataaaggttatatgaagactggtaaaatgtcaagtgtagaagaagaaaatgattccttcacatattacttccagactaagaatggtggtaatggtaaaggtatcaacggagaaaacagtggatatctgtactggaatggaaagagactggaagctgatgatgattatagaatctatggaatcggaagcgattactatcttgtaattctcagaaccgctttttgctaacaaggaaatcaagtctctaattgcagctttttgtcaatattttgttcccgctagtatattgcagaaaaacctcccaagttacaacctggggaggttccttttaattaattaagagataatgcatcggtatctgcttcagcgacccatgttacgatatcgccatttgtaacaactcatagctgtaagtattgtcatacagtttgatctctggaactgtaatagctttcgcaaccttggaatccattgttgcaatatcttttacattttctataacaacaggaagtgtgtatgtcttgtcacctacagtcagggacttaacagaatctccatttccaaatgctacagttacttcttcatcaaagttttcaatatcatatttcttggttttagatttctggatcttacctttgttatttacaaggtaaactttaccctctgataagtacaatctgtaatcatcatcagcttccagtctcttaccgctgaaatacagataattatccttttcaccgtttacaccttcaccgtttttgccgttcttggtgttgaaatagaaggtgtaggaatcatcatcatcttctacattggtaactttaccggtcttcatatagccattgtcatcaaagtagtagaaacctttagctgccggaatatactgtaaaccggtctgcatacgaccaacttcatcgaaacagaaatacttgttgttgcttgctttgattttaatctttgctctccagattggagtctcatcattgtcttcaatttgagcaaagtctttatcggagtcagctctctttgcctcaccatcatcgaagtagtaccagtctgtatcattatccgtaccaacatcttcagcaccatctatttcgtaccagccgtcagctctccaaccttcttcaacctgattcatgtaaagcatattttcgatttcggccttattaggtgtggctacattaccatcagcttctgcattagatggggaacctttaaccttaaccttagcgtcgttaatccactcgtataacatctggccatgttcattaaagtagtagtatttaccattaacttttttcttcttataatctttgtacattttaccatgcttccgaagtagtaccagccttcctcgtcgcagatgctgcactcatcatcacatcctgtgatatcgtcatcatcatccggtttttcaagccataaccagccagattcttttctccagccttcgtcttctccgcctaagtaataaacgtctccgtcatcttcataccagccgtcctgcatttcgccgtcttcgttaaagtagtaagttttaccagcgattttcttggattcggttgttttcttacctttgcttccaaagtaataccaatgatcgccatcctcatccggatcatcaatatcttcatcagatgttgtcttaatccaggaattaaccagcatagcgccgtcattgccaacatagtactcatcgtcaacccagctgtctgtcagcatttcgccgtcatcatccaggtagaaccactttccgccgtctttcttccactcacctgttaccaattcgtcatcactatcataatagtgccagataccagaatcatctttttcccaaccagcggcgaaagatgtcatggaagcacccatagcgagtaaagctgctgcagataaaactgcaactaatttagtctgctttctcataattaatgcactctcctttttttctttttgaaatatttttcgaaattcctaattgcattacgaggtcattatacttcggataaggaaaattatcgcaagttaaggatgttttatcaccctattttgtcatactattcaacataaaatagatttacttgtattattaagtaaatattcattgattctcaatcaataggatggtatagtagtataagattttttatcactgaatttttgataacatggatttgggtaatttatttgggatgaattatggtatatttatgcagaaaatctgttcaaatagaacgcgggcagcggtatttcctgtttatttatcatgtcatcctttccaagatccttgtgattcatcgttacagttcggacagtatgagctgttacgatgaatcacattcacaaatttaacatttgaaaggagcttccattatgaaatacctatccgactccctgccacagactgcctgcatccccctgtccttcggcaatgaagcccctgagcaggctttagggattctctcaccggaacctgcttccgatgaagaaaaaagggaatatgcaaaacagaccgctatccggcatgccatgagcatcgaagattaccgtctctatctttcagcacaaaatatgtcggaaaatacaattcacgtatatgcttacgctatccgccagttttttgcactataccacgaaattacatattccaatttgaaattgtataaggtttttcttctggaacattacaagccgcagaccgtcaacctgcggattcgggcgctgaactcgtatattgagtttaaaaagcttaatcctggaaaaattcctatggtgcgcatccagcataaaaattatcttgacaatgtaatcagcgaggcagattatgaatacctcaaaaattgtctgctccgtgatgagaaatacctctattattttattatccgttttatggctgcaaccggagcgcgtgtcagcgaggtaatccagtttgaagctgaagatatcttcaccggatataaggacatctactcaaaaggaaataaggtcaggcgcatctatgtacctaaagctctgcaaaaagatgctattgcctggttgaaagcaatcagacaggaacgcggatttgtatttctaaaccggtatgggaaccccattacccccggtggaatccggggccaactcaagaatatggctcttgcctacgggatgaacccagaagtggttcatcctcattctttccgccaccgttttgccaaaagctttatcgaaaaatgcggagatatctctctcctctccgatctgcttggccacaaaaacctggaaaccaccaggatttatctgcgccgttccagcagtgagcaatatgaaatcatcaacaaggtggtggactggtaacaagataacaggccaccgtcttcagtaaaaggagttatacatggaggaatcacttgaaaatacagtagaacaatttaaaatatacctggaaaagcagggacgctcagctaagactctcacttcctatgcctgctcagtctcaatgtttatttcactttgcggtgagcttacagtcgaaaatttgaaaagatacagggaatatctgctcaaaaactatcagctcaataccgtaaatacaagaatttacggtatgaaccgttacctcgactatttacaggagagcggccggcttcctgcttcactgacactcccctccggaggtcctcccgactggcaggaaccaatccacttaaatccggttaaaataacaagggacggcgtctacagaatgcagcctgtaaaaaaacagaaaaaagttatcttgataccgttatttctcagcgggattatgagcgcatgaagcgcagattaaaacaggacggaaatatgtactggtattttgtcatccggtttcttggtgcaaccggcgcccgggtaagtgaattactgcagattaaaatagaagatttgcgtctcggttatttggatctatatactaaagggggcaaaatacggcgtctgtacttcccacgaagtctctgcgcggaagccatcccctggttcatggaacgcggaacgaggagcggatttatttttaaaccagcacggcaacctgatttcatcgcggggtattgaactcagattgaaacactttgccaaactatataagataaatccaaaaaccgtttatccccattcattccgccacgatttgcaaagaactttttaaaacgtttcaatgatatttctcttcttgccgatctgatggggcatgacagcattgagacaaccagaatttacctgacccgttcaagccaggaacaaaaggccctgctggaccggattattacctggtgaatttactaaaaagaggaatcgcctgaaccggcactgtgccggaactggcgattcctcttttgggacttattgtacagtcccgttttgcctgtaacataaattatatagaacgttttacagcaccttgcttaaaaacgcctgtaatctttcgctctttggatgcccgaaaaactcattcggttcattttcttccgcaaagtttccgccgtccataaacattacacgtgtcgctacctccctggcaatgccagagccgagtataggaaaaaggagaaatattcacactatggatatatcaaaaatcatttgtgagtcattagacgaatccatgaaagaagtcgctgatggaaaattcaaaactattgcaatgttgacgacgaagaagtttctgaatctggaagcaaaatgccatgctaatgaattattcagctattcttttaaggaactatcacaatgaactcaaacgatattggctaatcagggtattgatatttagtttttaataaagacgctgctaaaataaatgcttatcatcttacttaaagactgctttctgccagaggcagtctttttcttttgttttcttccactctctcacgctctctcttgtcttttttgtcactcattctataatgtacttacaggtgttacagcgctaagtataaaataaagaggtatcgtttatgtcttcattaaaatcttttttgcatcctaccaatgagccaacttctgagcctcagtattcagaggatttgcacaacgccatcatggaatcatgtctcgatgattctattaaggtaatccgttatctcgaagagcaaagccaaaaacaaaaaggctacaacaccgcagtgctaatattcactttcattagtgctataggtggaatcattgcgctgtaacagggatccttggtttgctcaaatagagctcttaactcacgcagttctctcaaaatttgtaccatgaacattgtgctgacatctttcttcttatctgcataatgttcaatttgctttaaacccctcatccgttaaattcatctctcacgctcctttctcatctgtgctaccctcagaaaaaagataatccactgtacactgaggaaaaacttttttcttaattgcatacatttctttcttttaaattcggtggttcgttcgctttgttttttaacgtttcatagttaattgctgtcatttcgacaatgctttcagagttaactttcgtcttgccaactcagcatttaaattgggaaacattctatcacctccgtttgttacctacatcgtaatatattcgcattatatacccacatcgtaatatgtcaacctaaagtgttgcttttttatttcacagggtatttttttactttacaaagtaatagaaatgttgtatattcattttataaggaggttagttatatgacgtttacagaaaaattagatatgctaatggaaaagaatcacatgaataagtcgagctgtctcgtatatcaggaattccatatacgactattgatggattttacaaaaagggttcagacaatataaagttatctacattaaaaaaattagcaaagagttttaactgcagtttggactacttagtcgatgatgagttgttgataacgagcctcaaactattgccgcgcacaagaacaaaattggacacaggaagaattaaataaaataaacgactttaaaaaaattgttattagctgcagatcaaataaagggagtgattgatttgacttatgaggaacttcaaattgaaaatgaaaatttgaatatacaagagttagatctttcgaagtatctgagcttaaggattatacatagatggaaatattgctattcacaattctttgagcgaaaccgaaaaagcttgcgtccttgctgaagaacttggcatcattatacaagcagcggaaatatacttaatttaaatatagcaaataatcgtaagcaagaatatgttgctcgactttgggcctataaaaacaagtcggaatttcaaatattatcaaagcctatgaatacggttgcaatactttaaatgatactgcagaatttttaaatgtcacggaagaatttcttatagaggcattgaatgctatcgccaaatttatggggacggcgtttcttttgaaaattatcgtataaaatttgaacgtatttgcaaattaataaatatttatgggaatcaatgtgactcaaagcggaggaagaagtaatctatgagtataaaagggactactaaagaactttttgtcggaaaggaagaaattaatctcattacttttattggaaataagataacaattccttattctgttatgaaaggtgttaattattcctatgcgtctcgtcttaaaaccggatttctgctatttaaaaaaaatgataatactaatatacgttttgattttggttcagcgttaatgaaaaatcactcagactattaattttatcaatgaacatcagccttggcttgaaacaaaagaatttgatattaatgaatttaaaaacaaccgttctgcctcattgacgccaatttcaggttataaggaattgggttatcatcgttaaccttatccattcatcaaagagtggatggtagcatttattttaattctgacacatcaaaactttacactatatcatcgtacgaatgaacggtccagaatatgacgtcattacaaataccagtgccaatgtaactggaaaaaatactaccaaaaaacaggggaaagcattgaaaattggtgccgggcattattgggaaatttggtagcgcctggtgttggcacgcttgttggtgctgctatgggcgcaggaagcaaaggaaaagaaaaacgaaggacataaaactactaattctcaacaaatagaaaaaaaaagttgaaaatagtaccatcgcttttctaccttatcagtattgatacaaaaaaggtgtataaaatttcctttaaatgcgacacaaaattggacgcaactctaaggtgtttcgacatcgtaataccagatttgaaagagtctattgtaatagatacccaaaatcattagaagacatcaaggtattaaaggaattgctggatatggagccatcacccaagatgaatttgatactaagaaaaagcaactacttcgatagaatataaaaagccctgtgcggaacacagaagcttttcacatagaatttctcttaccggatgcccgggaagatataattagcttagacacctaaattatatcatccttagagcgtcctggcaaggggcgtattttttatacccaaaacacagaaaggatgatattatggcaaaagcaaaaaaactccctctggctcctggcgcgtccagatttttgaccataaagatgtggatgcaaaaggcactacaaatcctttacagcctccaccaagaaagagcacagttcatggctgctgcatgggccgcaggaaatgcgaacgaacgtccagaaatatcacgctgtatatggctgtctcaaaatacatcgatgcaaagcgcggcgtcttatctcccagtacggtggctttctacgagcagacgcagcgctgctatctgcgcaaggtaggcgagacatcgttaaaagatctgactaacaccatcctgcagatctggattagtgagatcgcaaaagaccacagcccgaagactgtccgaaatgccacgcctcgtctctgccgccttagagatgtttgcccccgacttccgtatcaagacgacgcttcctgcgagaaaaaagccagaactgtatactccatccgatcaggatgtccaaaaacttctcacacatgtcgctggaagggaattagagattgccatcctcctggccgctttcgccctatgcgcagaggagagatctgcgccttgacgtcggatgatatccatggaatattgtgagcgtaaacaagagtatggtgatggtccggatcgcatctggtcggttaaacagccaaaaacttatagcagctatcgtgaaatagaatatcctgcttttgtcatcaaaaaatggccggatagagggccgaatcatcaaggccaccccggagcagatcaccagccggttccgtcgggctgttaaattttccggagttacacccttccgttttcacgatctcagacattacgcagcaagtattatgcacgcaatcggggtacccgatcagtatatcttcagcgtggaggatgggccagcgacaatattatgaaaagtgtctatcgcaatgttattgatatggaagcagcaaagcaaaaccggaaaatcctaaagcattttgataaggtatcacacgaaatatcacacgagggctgatttcccttgatattacaggcttttcatacaggttcgagtcctgttgtctccattgaaaagagaagccgcgtatttgcaagaaaccttgtatttacgcggtttttcattgttttaatcttagtagagttataccgatttagtacgaaaatatcacacgaaagcataaagtatcacacgaaatatcacacgaaataaggcgccggatcactccttgcgccattatcatctataaattctacaatatcccctatctcgcatttcaatattctgcaaagcttttcagccgtaagcattgtaatgttcgcattatttttcaaattgtgaattgtcttcttgtcaatccctctttaatgagcttatacgttgtaacattctctttttccattttatcccacaacggcttataacttatcattcttccacctctcttgcctttactatactttgcggcataggggttgaatatactgattatattcagtataataagccatattattccagtttttaccagctttatcactgcaccaaagtagtacaataaattacaaaaggaaggggatactgaatgaaaaagaatcggattaaaaacaatctcatttattactggtccgttgttgctcgtattacaactggcttagtctgcacattatccatttttgcaaaacgggaaaattgccctgcaaaaggccgaaatatagccgggaagaaatacgcgaagagcttaagaaaattgctgaagagttaaaaaataaagaggcccagttgagggtccgggcctggagagtaggatatgcagggcgaggccagcggagagcttgtctcccggcgtcgcccatatttaatgatagcgcaggcttgttttttgcccctatttccaacaaacggataaggtggtgattttgtgactatttttatattattaattatttatctactatattttatatctattccatttcggtatgtctaccacatttattaaatataatactatgcaaaagtactaaaataaaaaattactcaaaaaatcaatacacaaattagctaaaatgtcaattgtaaatttgtgcaaaatgtcatatactaataatataaatttgtcgttagggaggtgagcgaatgtcgtatagagctattgatgttgcggattatattatttcaagagcatatcaacgtggaaaacctattagtaacttaaaactgcaaaaaatgttatattatgcatgggttgacttttataagaaaacttcacggcacctcttctatgaacctatttgcgcatggccattaggccctgtagttccggaagtgtataatgaatattgctcatacggtggcaggccaattagatttctaatagatgtactgatattagagattttgattcatatatcttagaccaaatcatcgataaatatgttgatattccagccagtgtgttggttaaccaaacgcatataacaggaggagcttgggatactatttacaaaaatggattgaaatagggatgtaattccattttctttaattaataaatgtgaatcacagaggtaatcatgctttccgtagaacgtgaaaaaatacaagatagacttgaaaaaacagctttataagttgtcggaaaagttgttaaatgaggagaagtcagcggagtaacttctatatttaaagaaatctactctgctgatttcgtcataattattcggatttctttccactgattttaaatatgaataaagaagatacaaagtataacttagactatctttcttcgaatctggaaacgctaagatcatatgttgaagagtgtaaagatatcgatgacagcgagcttagtaatatacataaaaaatttgctaagctatgtgatcatttaaacttggaaataagtagagttttatattattctaacaaagaaaaagctatgcttatgatggatcaaaaaatcgaaaatgtgtcattgaacgtagaaaaaagcactgcaaagttagaggaggcaatagccactgcaaaagcagtccaaaacaaggctgagtctatacagaccgagctaatttctgttttaagcatatttgcagcaattgttattgcattttcaggaagcctaacatttattggcagtgctgttactgcagcttcaaacacttttattttaaaacttgtttttattttattggtgtgtgcaatttgtctttttaactctatcgttgtgatgctataccttattggaaaaataatcgggaaggagctttttttaggatgtaaagccgattgttgttcctgcacgcttcaaaagcatagatgtagtagcataaaaaaaattcgaatgagaattccgtacgtattctatttaatatattcgtgattctttttttaatagccgattttgtaatgtggattatctatcgccatatataagattttttattttagaatgcaatagactgaatcgtctactgcattcctttttaattttattctatgctatataccatatctccaaaccgccaaaccctccggcccgctcgtgccagcatgccccctccaacggcccatccaccgtattgtcgaggaaataccagtctcccgttcatccagcccgatgacgctgctgcgttccagcgctgcaactggtcagcatgtagccgtccttaccgaaaaggtacagtgatgattgataagctgccactcattcgtggcatatcggccgtcagacttacggtaacggtattttccctgggtatcgtgttccagtctccaactgccttctcaggcccagacaacgccgccttaaatgcatcccaggtatgtttcgtgtgattataaacatatgggttgggcatatcttacctgtcacgtcgtaatgcggataacatggtccgccgtgacgccgtacttagccatcagttcttttgtcagggcaatcgctgcctccactgtcgcgtcctcaaagtaccagtcacggctggtgtctgcctggctccccttattccgcacgcaaagttcgattccaatactgtttgtgttccggcactccgggtgcttgtacgacttcgcgccacaatgccaggcaatattcttatcctctaccgactgccatatctctccctcaaagcccacaaagtagtggcgctggccccgatgcgctgactggcataataccggcagttggcctccgccccgccggtagcccccacgtaatggatgacaatgtatttaatgcggcttaactggccggggttgtaattataaggcgtgagtaattgatgtatctgcattttaacctccaatcaaaaaggccggaagctccaggtctatgtactgctgttgcccttaagctgcttgtacatctgattaataccagtagccgcaagccctgatacaacgcctaccgctgccgcattgatgatatctgttgccgggtaatcggcatcgtatacatgcctacaacacccagagcggccccaattacgccgcaaataactggcagccacttgttgtctaccgatgtcgccttgacggccatagcggccagataacacagtgctgtaattcctgctacacttgcaattccaaaatccataattattcctcgctttcttatctgatatactgtgccataatatagataagtccggtcgccactgctccggcccggctcctaccatcgtgttaaatatcgtccgcttcatactgctccaatgttccgccggctctgcttccagcttgccaagcgctctccttgggcgctctgctcctttatcatcgcctgcatattcaacgccaattccggacggacaggacaagctcctggattgtcttgctctgctcttcctggtcagccatccggtgtttaagcgaaccaatttcgtgatcatgcccttccagttttactgcaatttcttcgtctgtcacattcacctacctccttatcaaattattttatagtgcggccgttcctctccccaccaccagaaccgcagccaatcatccaagacaatcctgccagactcaccggcagccacagcaggcaatattgtggacatatctgccccaggacattacccggcagtctgctgtagtcccacacggcccagcccagacaaagatttacaatacatcctgtcataaactctaacgctgtaatcaaacaggcccctataactatctgcttccatagtggcatctgccagggcagtacctcattaataagtcccagacataaaaaacacagacctcccagaataaacatagtccaatgactccggccgcgccaggcaagttccagggaaatgtaaatcaatcctccgatttcgaccagtgccaggtgtttatacagggtccgaagcatccgcaccacctcccacaacggcagccatctgccgcagatacgccgtgagtacgtcagactgatactgctctgcacatctgcgccgtaaaacactgcctgcagctcctgagccgtctcgcaaccggcgatccacatgtttatggcattgcagtaggttggtgtgataggatacgtgctgcatggccgcctgtatgatagcctgcatgtccgctgcgctgtaataccggcagggcttaccgtccgcatgatactccagctgcgcggccccggctgccagctgggactgtttaccaaagaggttaagctgatctcgatggtcagggcgtaacgctctgtgctgccgtctgccagggtgacattgacgccggagtagataagccgttcacagtcggccgcactctgactttttagccgcctgtaaatccgacaaaggcggatcgtaaggctctggttccggcatcgggacaggctcttgataaacgctgccgtcattggataaccatactgtctgcccctcctgtcgataaactgtattgtatccgtcaatgtatcagcttccacgcctccgttgtaatgagagtgagatctccccagctctccgtactgcactctcaaagataatccgtagcactgtggccgactccggaagaatgctgctatagagatactccttttcattcattccaattcttaatttttccatactttcatttcctttctattttttatatataaaaaggtcccaaaggacctaattttcatgtttaaatggcgacataataactggagtagatagatttccaccggcaataccggcacgcaggaaattaccgttaattttccagaacctatgcgcggagcgccaaaagtatttgctatgtgggaagacactacaattactcttacatatgtagatggttagtaatcacaggggcgacatcttccggattcaaaatcgctacaaacaggctgaaccatctgaaaattggtggttttgttatatcgctatatataatcgatgaatccgaaaaaacaatgcaaaatggcgataacttttcgacatacaggtcttttattggccttgattttaatactattgaaagacaggttatttactcagatggatcaactccggatacctccggttgtaaaaactatcccgtcaatataacaggctactatttgtacttaggacgcagtatgtttgcgcacaaatttattttaccaatgacatgacttctttgcatgttcgcgcccgttatttatcaaatgtttggtcaggatggaggctttttccctgcttaaatgcgagatgcaaggaaaagtttccttccagtctggctataccccttttagtttgcggtatgatgaaaaatatccgacgtcctatatgtatataacataaacactaatgaattgcgttatgcgcgactgacaaacaatgaataaaatggcgagttggcagttctatgattaaagggctatacgtgtaccgaaaacggtttctattcttgatacagccaaaaaattttattggtagtaatggaatccattttctaaccgtagtacaagaggggaattcctggcgagtttaggtatagctctggcttgtccttagttcttttgatactttatcaattgttattttcagccgagaaaacagcaaaattgccgttaactcctggatttcaaataccgctaacaagtggaccggatggcgctattttacaggctctgccacactgtaaaatggcgaaataggcacgcttaaatcagtatcaggtaccaccgttattggcaatggaaccagagaggaactagaggctacatctctcactttagagcctggagtatggataatcacgtgttacagtgaattttttgaaggaactattcctacaaattcaatttataatacaactttacgcagtaactctaatggtcgaataatgactgttcgcagcactacaacaaacggtgggggtattaatgtcatacacgtagcaaagattaatgctgcagatacatttaaaataacctcctttgattacgatttcggaggcagtgtaaaattaaatataaatatgtatgccgtcagaatcaaataacaagtaaatggcgagagttttattgtcagggatggaatacgcgggaatgatgaccttaacaacattgttgtcccggggtattatcaacttagctcatcggcctccaatagtgtcgccaatccggctttcagaagtacatctattgttgaagtaatcacaacagactcgtacattgttcaagacaaacgggccaagtga
